(19) United States
(12) Patent Application Publication
(10) Pub. No.: US 2022/0380478 A1
(43) Pub. Date: Dec. 1, 2022

(54) ANTI-CD154 ANTIBODIES AND USES THEREOF

(71) Applicant: TONIX PHARMA HOLDINGS LIMITED, Hamilton (BM)

(72) Inventor: Seth Lederman, South Dartmouth, MA (US)

(21) Appl. No.: 17/623,710

(22) PCT Filed: Jul. 1, 2020
(86) PCT No.: PCT/EP2020/068589

§ 371 Date: Dec. 29, 2021

Related U.S. Application Data
(60) Provisional application No. 63/018,123, filed on Apr. 30, 2020.
(60) Provisional application No. 62/869,489, filed on Jul. 1, 2019.

(51) Int. Cl. C07K 16/28; A61P 37/06; A61K 45/06; A61K 39/395

(52) U.S. Cl. CPC C07K 16/2875; A61P 37/06; A61K 45/06; A61K 39/3955; A61K 2039/505

(57) ABSTRACT

This disclosure relates to anti-human CD154 antibodies with modified effector function. This disclosure also relates to the use of these anti-human CD154 antibodies in treating conditions associated with CD154 activation, such as transplant rejection, inflammatory conditions and disease, dysfunctional immune responses associated with viral infections and diseases, autoimmune conditions and disease, allergic conditions, atherosclerotic conditions, or neurodegenerative conditions and diseases. It also relates to the use of these anti-human CD154 antibodies in inducing central tolerance and hematopoietic chimerism in transplant patients.

### CROSS-REFERENCE TO RELATED APPLICATIONS

[0001] This application claims priority from U.S. Provisional Application No. 62/869,489, filed Jul. 1, 2019 and U.S. Provisional Application No. 63/018,123, filed Apr. 30, 2020, the contents of which are hereby incorporated by reference in their entirety.

### SEQUENCE LISTING

[0002] The instant application contains a Sequence Listing which has been submitted electronically in ASCII format and is hereby incorporated by reference in its entirety. Said ASCII copy, created on Jul. 1, 2020, is named 104545-0037-WO1_SL.txt and is 753,090 bytes in size.

### FIELD OF THE DISCLOSURE

[0003] The present disclosure relates to isolated antibodies with modified (e.g., selectively reduced) effector functions that bind to CD154. The disclosure also relates to nucleic acid molecules encoding such antibodies, compositions comprising such antibodies and methods of using such antibodies and compositions for inhibiting an immune response, such as in the treatment of transplant rejection, inflammatory, autoimmune, dysfunctional immune responses associated with viral infections and diseases, allergic, atherosclerotic, or neurodegenerative conditions and diseases.

### BACKGROUND OF THE DISCLOSURE

[0004] CD154 (also known as CD40 ligand, CD40L, gp39, TNF-related activation protein (TRAP), 5c8 antigen, T-BAM) is a protein primarily expressed on activated CD4+ T cells and is recognized as the molecular basis for T cell helper function (Lederman, S., et al. J. Exp. Med. 175:1091-1101 (1992). CD154 is a member of the TNF superfamily of molecules and is functionally expressed as a homotrimer. Some of the CD154 units, however, have shortened peptide chains, such that CD154 trimers can be considered heterotrimers of elements all encoded by the CD154 gene (Karpusas M, et al. Structure. 3(10):1031-9 (1995); Hsu Y M, et al. J Biol Chem. 272(2):911-5 (1997)). CD154 binds to CD40 on antigen-presenting cells (APC), which leads to many effects depending on the target cell type. The primary binding partner for CD154 is CD40, although other binding partners αMβ2 (Mac-1), α5β1 integrin and αIIbβ3 have been described (El Fakhry Y, et al. J Biol Chem. 287:18055 (2012); Wolf D, et al. Circ Res. 109:1269 (2011); Michel N A, et al Front Cardiovasc Med. 4:40 (2017)). CD154 acts as a costimulatory molecule for B cells and affects the function of CD4+ T follicular helper cells (TFH cells). On TFH cells, CD154 promotes B cell maturation and function by engaging CD40 on the B cell surface and thereby facilitating cell-cell communication in a humoral immune response. CD40 triggering by CD154 stimulates adaptive immune system processes in B cells including immunoglobulin class switch recombination and somatic hypermutation (Lederman S, et al. Curr Opin Hematol. 3(1):77-86 (1996)). Absence of CD154, for example, in the X-linked Hyper IgM syndrome, leads to deficiencies in the formation of germinal centers, class switch recombination and antibody affinity maturation. (Webster E A, et al. Arthritis Rheum. 42(6):1291-6 (1999)). The CD40-CD154 interaction is involved in normal T-B cell interactions, including increased co-stimulation, T-cell priming, cytokine production, antibody-class switching and affinity maturation, and antibody production (Lederman, S., et al. J. Exp. Med. 175:1091-1101 (1992); Lederman, S., et al., Journal of Immunol. 149:3817-3826 (1992); Lederman, S., et al., Journal of Immunol. 152:2163 (1994); Cleary, A. M., et al., Journal of Immunol., 155:3329-3337 (1995); Muramatsu, M K et al. Cell 102: 553 (2000); Xu Y and Song G, J. Biomed Sci. 11(4):426-38 (2004); Quezada S A et al., Annu Rev Immunol. 22:307-28 (2004); and U.S. Pat. Nos. 5,474,771; 5,933,816; 6,331,615; 6,340,459; 6,403,091; 6,451,310; 6,455,044; 6,592,868; 6,610,294; 6,793,924; 7,070,777; and 9,765,150).

[0005] CD154 also interacts with CD40 on activated endothelial cells (Yellin M J et al, J. Exp. Med 182:1857-1864 (1995)), activated fibroblasts (Yellin, M J et al. J Leukoc Biol. 58:209-216 (1995)), in other cell types and in many cancers (Paulie, S, et al. Cancer Immunol Immunother, 20, 23-8 (1985)). Supernatants of severe acute respiratory syndrome-associated coronavirus (SARS-CoV) infected human lung epithelial Calu-3 cells and induce CD40 on dendritic cells (Yoshikawa T, et al. J. Virol. 83(7): 3039-3048 (2009)). In the retina, during inflammation, CD40 is expressed on endothelial cells, Müller glia (macroglia in the retina), microglia, ganglion cells, and retinal pigment epithelial cells (Subauste, C S, Front Immunol 10:2958 (2019); Portillo J-A C, et al. J Immunol. 181:8719-26 (2008); Portillo J-A C, et al. Diabetologia. 57:2222-31(2014); Portillo J-A C, et al., Mol Vis. 15:1383-9 (2009)). The roles of CD154 in an immune response are normally tightly regulated in tissues over time. Dysfunctional immune responses can occur with abnormal CD154 expression and function in certain tissues and at certain times, contributing to syndromes such as acute respiratory distress syndrome (ARDS), autoimmune diseases, vasculopathies and the promotion of cancers.

[0006] The soluble form of CD154 (sCD154), which results from the shedding of membrane-bound CD154, plays a role in the production of proinflammatory cytokines and has been linked to various autoimmune and vascular disorders (Yellin, M J, et al., J. Immunol. 152:598 (1994); Yacoub D et al., J Biol Chem. 288(50):36083-93 (2013)). Activated platelets produce CD154 and platelet derived CD154, particularly soluble CD154, has been linked to pathology. (Henn V, et al. Nature 391:591-594 (1998); Xu H, et al. Transplantation. 72(11):1858-61. (2001); Danese S, et al. Gut. 52(10):1435-41. (2003); and Charafeddine A H, et al. Am J Transplant. 12(11):3143-51 (2012)).

[0007] The monoclonal antibody 5c8 is a murine anti-human CD154 that potently blocks CD154 function. (Lederman, S., et al. J. Exp. Med. 175:1091-1101 (1992); Lederman, S., et al., Journal of Immunol. 149:3817-3826 (1992); Lederman, S., et al., Journal of Immunol. 152:2163 (1994); and Cleary, A. M., et al., Journal of Immunol., 155:3329-3337 (1995)). A humanized anti-human CD154 IgG1 antibody (hu5c8, ruplizumab or ANTOVA®) was generated and tested in non-human primates and humans. A crystal structure of hu5c8 showed the unique binding of hu5c8 to the CD154 trimer and antibody contacts with CD154 monomer (Karpusas M, et al. Structure. 9(4):321-9. (2001)). CD154 blockade has demonstrated efficacy in models of autoimmunity, humoral immunity and allotransplantation (Pierson R N 3rd, et al. Transplantation. 68(11):1800-5 (1999); Chang A C, et al. Transplant Proc. 31(1-2):95 (1999); Kenyon N S, et al. Proc Natl Acad Sci USA. 96(14):8132-7 (1999); Kenyon N S, et al. Diabetes. 48(7):1473-81. (1999); Elster E A, et al. Transplantation. 72(9):1473-8. (2001); Elster E A, et al. Transplant Proc. 33(1-2):675-6 (2001); Cho C S, et al. Transplantation. 72(4):587-97 (2001); Pierson R N 3rd, et al. Immunol Res. 23(2-3):253-62 (2001); Pfeiffer S, et al. J Heart Lung Transplant. 20(2):250 (2001); Xu H, et al. Transplant Proc. 33(1-2):223-4 (2001); Xu H, Transplantation. 74(7):940-3 (2002); Crowe J E Jr, et al. Am J Transplant. 3(6):680-8 (2003); Ferrant J L, et al., International Immunol October 5; 11:1583 (2004); Kawai T, et al., Am J Transplant. 4(9):1391-8 (2004); Preston E H, et al. Am J Transplant. 5(5):1032-41 (2005); Xu H, et al. J Immunol. 170(5):2776-82 (2003); Wu G, et al. Xenotransplantation. 12(3):197-208 (2005); Smith R N, Am J Transplant. 6(8):1790-8 (2006); Zhang T, et al. Transplantation. 102(3):e90-e100 (2018)). However, clinical trials of hu5c8, in systemic lupus erythematosus (SLE) (Huang W, et al. Arthritis Rheum. 46(6):1554-62 (2002); Boumpas D T, et al, Arthritis Rheum. 48:719-27. (2003); Grammer A C, et al. J Clin Invest. 112:1506-20. (2003)) and transplantation (Kawai T, et al. Nat Med. 2000; 6:114. (2000); Koyama I, et al., Transplantation. 77(3):460-2. (2004)) were halted due to an increased incidence of platelet activation and thromboembolic events (Law and Grewal Adv Exp Med Biol. 647:8-36 (2009)). One mechanism for platelet activation may relate to CD40 on platelets and activation by soluble CD154 (Inwald D P, et al, Circ Res. 92(9):1041-8 (2003)). Several observations suggest that a mechanism for thrombosis in anti-CD154 treated patients is mediated by Fc gamma RIIa receptor (FcγRIIA, FCGR2A, CD32A)-dependent platelet activation by immune complexes, particularly higher ordered complexes, comprised of anti-CD154 antibodies and soluble CD154 (Robles-Carrillo L, et al., J Immunol. 185(3):1577-83. (2010)). Eliminating Fc binding to Fc receptors by mutating the Fc region to make aglycosyl hu5c8 (IgG1 N297Q) has been shown to strongly decrease or eliminate such thromboembolism (Shock, A, et al., Arthritis Res Ther. 17:234 (2015) and Xie et al., Journal of Immunol. 192(9):4083 (2014)), but also reduced the antibody's efficacy in inhibiting or preventing transplant rejection in rhesus renal and islet allotransplantation models (Ferrant J L et al., International Immunol (11):1583 (2004)). Entirely eliminating the Fc region, such as in an anti-CD154 pegylated Fab′ antibody fragment (Dapirolizumab pegol (DZP), CDP7657, Biogen and UCB) also reduced the risk of thrombotic events but failed to treat systemic lupus erythematosus (SLE) in a Phase IIb clinical trial (Waters J, Biocentury; October 26, (2018)). Kim et al. generated an Fc silent anti-human CD154 single domain antibody (dAb; BMS-986004; Letolizumab, BMS2h-572-633-CT-L2) by fusing the variable domain of an anti-human CD154 dAb with the Fc from CTLA4-Ig (abatacept, ORENCIA®) and a linker termed “CT Long Fc” with amino acid sequence EPKSSDK (SEQ ID NO: 325) (Kim S C et al., Am J Transplant 17(5):1182-1192 (2017); and U.S. Pat. No. 9,765,150). BMS-986004 effectively prevented kidney rejection in nonhuman primates and was also devoid of platelet activation, thrombosis or thromboembolism (Kim S C et al., Am J Transplant 17(5):1182-1192 (2017).

[0008] U.S. Pat. No. 9,765,150 also described BMS-986003 (BMS-2h572-633-CT), which shares the same amino acid sequence as BMS-986004, except for a non-native glycine residue at its amino-terminus. BMS-986003, however, induced anti-drug antibodies (ADA) in treated monkeys. The ADA were directed to the dAb (non-Fc) portion of the molecule and these antibodies were shown to block the binding of BMS-986003 to CD154 suggesting the ADA may be neutralizing. In addition, these ADA resulted in increased clearance of BMS-986003 in several monkeys. In contrast, a chimeric murine 5c8 human IgG1 chimeric antibody had expected long plasma half-life. (U.S. Pat. No. 9,765,150).

[0009] While BMS-986004 demonstrated efficacy in an immune thrombocytopenic purpura (ITP) clinical trial, the pharmacokinetic profile may be suboptimal (NCT02273960; “Study to Evaluate Safety and Efficacy in Adult Subjects With ITP (ITP)”; results accessed Jul. 1, 2019).

[0010] The mechanism of anti-CD154 treatment of transplantation rejection or autoimmunity is not completely understood. Anti-CD154 therapy appears more effective than anti-CD40 therapy, suggesting that blockade of their interaction is not symmetrical. The monoclonal antibody (mAb) hu5c8 appears more effective than a different humanized anti-CD154 mAb, IDEC-131 (O'Neill N A, et al. Transplantation. 101(9):2038-2047 (2017)). Further, an increase in regulatory T cells, specifically Foxp3+ T cells, associated with anti-CD154 therapy may relate to efficacy (Ferrer I R, et al., Proc Natl Acad Sci U S A. 108(51):20701-6 (2011)). Another observation supporting a role for regulatory T cells was that dimeric soluble CD40, but not monovalent CD40 induced T regulatory cells (CD4+CD25+ T cells) and treated transplant rejection (Masunaga T, et al. Transplantation. 80:1614-1622 (2005)). Those experiments also showed that valency in CD154 ligation or blockade may be relevant to efficacy (Masunaga T, et al. Transplantation. 80:1614-1622 (2005)). Anti-CD154 treatment was shown to be particularly effective in facilitating allotransplant with mixed allogeneic chimerism (Kawai T, et al., Am J Transplant. 4(9):1391-8 (2004) and in xenotransplantation (Längin M, et al., Nature. 564(7736):430-433 (2018)).

[0011] Antibodies have a variety of effector functions mediated by the Fc including FcγR binding and complement C1q binding (the first component of complement activation), which relate to effector functions and complement dependent cytotoxicity. Engineering antibodies may result in increasing or decreasing one or more effector functions. At the extreme, the Fc can be removed, for example in a F(ab) construct, but for therapeutic effects, such constructs typically require other changes to increase half-life, such as modification with polyethylene glycol or PEGylation. Entirely eliminating the Fc region can affect an anti-CD154 antibody's efficacy—an anti-CD154 pegylated Fab′ antibody fragment (Dapirolizumab pegol (DZP), CDP7657, Biogen and UCB) failed to treat SLE in a Phase IIb clinical trial (Waters J, Biocentury; October 26, (2018)). A “silent” N297Q IgG1 variant (asialo- or algyco-) of hu5c8 lacked FcγR binding, but was effective in inhibiting the humoral immune response, but not organ rejection in non-human primates. (Tao, M. H. and Morrison, S. L. J. Immunol. 143:2595-2601. (1989), Ferrant J. L. et al., International Immunol (11):1583 (2004)). Therefore, a solution to balancing efficacy and safety of anti-CD154 antibodies is to engineer an anti-CD154 antibody with a modified Fc with selectively decreased effector function. Prior efforts on modifying effector function have focused on substitutions in the IgG hinge/CH2 region, which can affect FcγR and C1q binding. A consideration in designing antibodies is to maintain the CH2/CH3 region of the Fc domain that is required for interactions with FcRn, the neonatal Fc receptor, which confers extended serum half-life.

[0012] Among IgG1 antibodies, substitution studies identified several residues that affect Fc binding to C1q and to various FcγRs (FcγRI/CD64, FcγRIIa/CD32a, FcγRIIb/CD32b and FcγRIIIa/CD16a and FcγRIIIb/CD16b). For example, Fc residues at positions 234 and 235 have been shown to have a modulating effect on Fc-CD64 binding (Canfield, S M and Morrison, S L J. Exp. Med. 173:1483-1491 (1991); Chappel, M S, et al. Proc. Natl Acad. Sci. USA, 88, 9036-9040 (1991); Alegre, M-L, et al., J. Immunol. 148: 3461-3468 (1992); Hezareh, M, et al. J. Virol. 75, 12161-12168 (2001), Fc-CD32A binding (Hezareh, M, et al. J. Virol. 75, 12161-12168 (2001); Armour, K L, et al., Mol. Immunol. 40, 585-593. (2003)), Fc-CD16 binding (Hezareh, M, et al. J. Virol. 75, 12161-12168 (2001)) and Fc-C1q binding (Xu, D, et al, Cell. Immunol. 200, 16-26 (2000); Hezareh, M, et al. J. Virol. 75, 12161-12168 (2001)). Also, CH2 position 331 was shown to be involved in Fc-CD64 binding (Canfield, S M and Morrison, S L J. Exp. Med. 173:1483-1491 (1991)) and Fc-C1q binding (Tao, M H, et al., J. Exp. Med. 178, 661-667 (1993).; Hezareh, M, et al. J. Virol. 75, 12161-12168 (2001); Idusogie, E E, et al. J. Immunol. 164:4178-4184 (2000)). As an example, affinity for FcγRs (FcγI, FcγRIIa, and FcγRIIIa) and C1q has been reduced by the substitutions in IgG1 of L234F/L235E/P331S (Oganesyan V, et al. Acta Crystallogr D Biol Crystallogr. 64 (Pt 6):700-704 (2008)). As another example, tepliczumab is a humanized OKT3 antibody with IgG1 Fc with reduced effector functions due to substitutions (L234A, L235A) that is in development for the treatment of diabetes (Xu, D, et al, Cell. Immunol. 200, 16-26. (2000); Herold K C, et al. N Engl J Med. 10.105 (2019)). Another modified (termed “silent”) IgG1 Fc modification with substitutions C220S, C226S, C229S, and P238S was employed to make a fusion protein expressing CTLA4 in CTL4-Ig (Abatacept, ORENCIA®). The cysteine substitutions remove the disulfide bonds between the heavy chains (HCs) in a dimer (C226S and C229S). Using this modified Fc, Kim et al. generated an Fc silent humanized anti-human CD154 antibody, which was a mutated version of hu5c8 (“hu5c8-mod”) that contained the same modified, non-Fc binding IgG1 tail as the anti-CD154 dAb BMS-986004 (Kim S C et al., Am J Transplant 17(5):1182-1192 (2017)). U.S. Pat. No. 9,765,150 also describes an anti-human CD154 “5c8” antibody generated by fusing part or all of the variable domain of “5c8” with the Fc from abatacept and a linker of either “CT Long” with amino acid sequence AST-EPKSSDK (SEQ ID NO: 326) or “CT Short” with amino acid sequence AS (SEQ ID NO: 214) (U.S. Pat. No. 9,765,150).

[0013] Among IgG2 antibodies, affinity for FcγR has been decreased by substitutions H268Q/309L/A330S/P331S in a muted version that has been called “IgG2m4” (An, Z. et al, MAbs 1:572-579. (2009)). Another engineered Fc includes V234A/G237A/P238S/H268A/V309L/A330S/P331S substitutions that eliminate affinities for FcgR and C1q complement protein (Vafa, O. et al., Methods. 1; 65(1):114-26. (2014)).

[0014] Among IgG4 antibodies, affinity for FcγR has been decreased by the F234A and L235A substitutions. These substitutions have been combined together with the S228P substitution in the core hinge (IgG1 and IgG2 have a proline in position 228), which further stabilizes the IgG4 molecule to prevent Fab arm exchange (Silva, J P et al., J Biol Chem. 290(9):5462-5469. (2015)), in a “muted” version of IgG4, that has been called “IgG4 Pro-AlaAla” (Tao, M. H. and Morrison, S. L. J. Immunol. 143:2595-2601. (1989) and Alegre, M-L, et al., J. Immunol. 148: 3461-3468. (1992)). Dulaglutide is a fusion protein that includes a glucagon like peptide-1 (GLP-1) agonist fused to an IgG4 Fc of the “IgG4 Pro-AlaAla” type, which is marketed as TRULICITY®. Others have modified IgG4 Fc with substitutions F234A and L235A with the S228P substitution (Xu, D, et al, Cell. Immunol. 200, 16-26. (2000)), or employed the substitutions L235E with the S228P substitution without modifying the F234 (Reddy M P, et al., J Immunol. 164:1925-1933. (2000) and Li, X, et al. Int J Clin Exp Med. 8(3):3607-18. (2015)).

[0015] Antibody engineering is a complex and costly technology with unpredictable results in vivo (Saeed A F, et al., Frontiers in Microbiology; Article 495; March (2017)). An antibody engineering strategy including structural changes or other modifications that are optimized for one antibody may compromise another antibody in vivo (Yan B, et al., The Journal of Biol. Chem. 287(8):5891-97 (2012)). The effect of a mutation on a particular residue (e.g., N297Q) in a particular antibody (e.g. IgG1) can have a very different clinical effect from another kind of mutation at the same antibody (e.g., N297A in IgG1). Moreover, the clinical effects of intramolecular changes within one subtype of antibody (e.g., an L235 mutation in IgG1) may be entirely unpredictable when the same intramolecular changes occur within another subtype of antibody (e.g. an L235 mutation within IgG4). Intramolecular changes also may result in different clinical effects, depending on how various mutations may pair up within an antibody. Species-specific differences add to the unpredictability of the effect of an Fc receptor mutation on the efficacy vs toxicity of anti-CD154 antibodies. In the past, anti-CD154 antibodies developed for use in transplantation studies did not cause thrombosis in pre-clinical rodent and certain non-human primates, but a number of human patients experienced thromboembolic complications in clinical trials with the same antibodies (i.e., ruplizumab, toralizumab, and ABI793) (Pinelli D F and Ford M. L. Immunotherapy 7(4): 399-410 (2015)).

[0016] To date, there has not been a fully human or humanized anti-CD154 antibody that satisfies the need for a product that can effectively prevent in humans transplant rejections (including graft versus host disease), inflammatory conditions and diseases, autoimmune conditions and diseases, dysfunctional immune responses associated with viral infections and diseases, allergic conditions, atherosclerotic conditions, or neurodegenerative conditions and diseases, with an acceptable level of side effects, such as thromboembolic side effects. This highlights the need for antibodies and variations thereof, that bind to CD154 with high affinity, and inhibit the downstream effects of CD154:CD40 binding, in the absence of toxic side effects such as thrombosis.

### SUMMARY OF THE INVENTION

[0017] A first aspect of the present disclosure provides isolated anti-CD154 antibodies, that bind to mammalian CD154. In some embodiments, the anti-CD154 antibody comprises a human or humanized variable domain, wherein the variable domain comprises a heavy chain variable region (VH) and a light chain variable region (VL), and wherein the VH is operably linked to a human Fc domain with modified effector functions. Optionally, one or more effector functions are reduced. Optionally, one or more effector functions are eliminated. In some embodiments the antibody is divalent. In other embodiments, the anti-CD154 antibody is functionally monovalent.

[0018] A second aspect of the present disclosure provides nucleic acid molecules encoding the anti-CD154 antibodies disclosed herein. In some embodiments, separate nucleic acid molecules encode a heavy chain and a light chain of an anti-CD154 immunoglobulin. In other embodiments, the same nucleic acid molecule encodes both a heavy chain and a light chain of an anti-CD154 immunoglobulin.

[0019] A third aspect of the present disclosure provides vectors comprising the disclosed nucleic acid molecules. In some embodiments, the vector comprises a nucleotide sequence that encodes the heavy chain of a disclosed anti-CD154 antibody. Optionally, the vector comprises a nucleotide sequence that encodes the light chain of a disclosed antibody. The vector may comprise a nucleotide sequence encoding the heavy chain and the light chain of a disclosed anti-CD154 antibody.

[0020] A fourth aspect of the present disclosure provides transformed cells comprising the disclosed nucleic acid molecules or the disclosed vectors.

[0021] A fifth aspect of the present disclosure provides a pharmaceutical composition comprising an anti-CD154 antibody disclosed herein and a pharmaceutically acceptable carrier. In some embodiments, the pharmaceutical composition comprises a therapeutically effective amount of the anti-CD154 antibody disclosed herein.

[0022] A sixth aspect of the present disclosure provides a method for inhibiting CD154 activity. In some embodiments, CD154 activity is inhibited by contacting CD154 with an anti-CD154 antibody disclosed herein. Optionally, CD154 is inhibited by administering an anti-CD154 antibody disclosed herein to a subject in need thereof. In some embodiments, the anti-CD154 antibody is administered in a pharmaceutical composition disclosed herein.

[0023] A seventh aspect of the present disclosure provides a method of inhibiting an immune response in a subject. In some embodiments, the immune response is inhibited by administering an anti-CD154 antibody disclosed herein to a subject in need thereof. In some embodiments, the anti-CD154 antibody is administered in a pharmaceutical composition disclosed herein. The immune response may be a humoral response, such as an antibody-mediated response. The immune response may be a cell-mediated response, such as one or more of a cytotoxic T-cell mediated immune response, a macrophage mediated response, a natural killer (NK) cell mediated immune response or a cytokine mediated response. The immune response could be a mixed humoral and cell-mediated response. The immune response may be a complement-mediated response. The immune response may be a primary response or a secondary response. The immune response may be a dysfunctional immune response, for example, an immune response to a virus that may lead to cytokine release syndrome (CRS), cytokine storm or acute respiratory distress syndrome (ARDS). The immune response may be a tissue specific immune response, such as an inflammation of the lungs, heart, or kidney, for example lung inflammation.

[0024] An eighth aspect of the present disclosure provides a method of inducing hematopoietic chimerism in a transplant recipient. In some embodiments, the method comprises administering to the recipient an anti-CD154 antibody disclosed herein, and transplanting into the recipient hematopoietic stem cells, thereby inducing hematopoietic chimerism in the recipient. In some embodiments, the anti-CD154 antibody is administered in a pharmaceutical composition disclosed herein.

[0025] A ninth aspect of the present disclosure provides a method of inducing central tolerance in a transplant recipient. In some embodiments, the method comprises administering to the recipient an anti-CD154 antibody disclosed herein, transplanting into the recipient hematopoietic stem cells, and transplanting a donor tissue into the recipient, wherein the transplanted hematopoietic stem cells produce immune cells that are tolerant of the donor tissue, thereby inducing central tolerance in the recipient. In some embodiments, the anti-CD154 antibody is administered in a pharmaceutical composition disclosed herein.

[0026] A tenth aspect of the present disclosure provides a method of inhibiting or preventing a xenotransplant rejection in a subject. In some embodiments, the method comprises administering to the subject an effective amount of an anti-CD154 antibody disclosed herein. In some embodiments, the anti-CD154 antibody is administered in a pharmaceutical composition disclosed herein.

[0027] Particular embodiments of the disclosure are set forth in the following numbered paragraphs:

1. An isolated antibody that binds to CD154, comprising a human or humanized variable domain, wherein the variable domain comprises a heavy chain variable region (VH) and a light chain variable region (VL), and wherein the VH is operably linked to a human Fc domain with modified effector functions.
2. The antibody of paragraph 1, wherein one or more effector functions are reduced.
3. The antibody of paragraph 1 or 2, wherein one or more effector functions are eliminated.
4. The antibody of any one of paragraphs 1-3, wherein the VH is operably linked to a human Fc region, wherein the human Fc region comprises a human hinge sequence and the human Fc domain, wherein the human hinge sequence is between the VH and the human Fc domain.
5. The antibody of paragraph 4, wherein the hinge comprises the amino acid sequence of any one of SEQ ID NOs: 76-90.
6. The antibody of any one of paragraphs 1-5, wherein the Fc domain is derived from an IgG4 Fc (or crystallizable fragment) region.
7. The antibody of paragraph 6, wherein the Fc domain comprises one or more amino acid modifications that modifies effector functions.
8. The antibody of paragraph 7, wherein the antibody comprises an amino acid modification at any one of the positions selected from the group consisting of S228, L235, G237, E318, and N297 or a combination thereof, wherein the numbering of amino acid residues is according to the EU index as set forth in Edelman.
9. The antibody of paragraph 8, wherein the antibody comprises an amino acid modification selected from the group consisting of S228P, F234A, L235A, L235E, G237A, E318A, and N297Q or a combination thereof.
10. The antibody of any one of paragraphs 1-5, wherein the Fc domain is derived from an IgG1 Fc (or crystallizable fragment) region and comprises one or more amino acid modifications that modifies effector functions.
11. The antibody of paragraph 10, wherein the antibody comprises an amino acid modification at any one of the positions selected from the group consisting of E216, R217, K218, C219, C220, C226, C229, P230, E233, L234, L235, G236, G237, P238, S239, V240, F241, K246, L251, T260, D265, V266, H268, W277, N297, E318, K322, P329, A330, P331, Q347, N348, T350, L351, K360, T366, N390, K392, T394, D399, S400, F405, Y407, K409, T411, or a combination thereof, wherein the numbering of amino acid residues is according to the EU index as set forth in Edelman.
12. The antibody of paragraph 11, wherein the antibody comprises an amino acid modification selected from the group consisting of C220S, C226S, C229S, P230S, E233P, L234A, L234F, L234V, L235A, L235E, L235V, G236E, G237A, P238S, D265S, D265A, H268Q, W277T, N297G, N297Q, N297D, N297A, E318A, K322A, P329G, P329A, A330S, P331S, Q347R, Q347E, Q347K, T350V, L351Y, K360D, K360E, T366A, T366I, T366L, T366M, T366V, N390R, N390K, N390D, K392V, K392M, K392R, K392L, K392F, K392E, T394W, D399R, D399W, D399K, S400E, S400D, S400R, S400K, F405A, F405I, F405M, F405T, F405S, F405V, F405W, Y407A, Y407I, Y407L, Y407V, K409F, K409I, K409S, K409W, T411N, T411R, T411Q, T411K, T411D, T411E, T411W, ΔE216-E222, K246R/L251E/T260R, InR234/235, InV235/236, InR236/237, InR237/238, InV238/239, InN238/239, InL238/239, InE238/239, InG238/239, InS239/240, InG240/241, InE240/241, InG240/241, InL238/239/P238Q, InE238/239/N348A, InS239/240/V266A, and InR237/238/G236A or a combination thereof.
13. The antibody of any one of paragraphs 1-5, wherein the Fc domain is derived from an IgG2 Fc (or crystallizable fragment) region.
14. The antibody of paragraph 13, wherein the antibody comprises an amino acid modification at any one of the positions selected from the group consisting of V234, G237, P238, H268, V309, A330, and P331 or a combination thereof, wherein the numbering of amino acid residues is according to the EU index as set forth in Edelman.
15. The antibody of paragraph 14, wherein the antibody comprises an amino acid modification selected from the group consisting of V234A, G237A, P238S, H268Q, H268A, V309L, A330S, and P331S, or a combination thereof.
16. The antibody of any one of paragraphs 1-5, wherein the Fc domain comprises the amino acid sequence selected from the group consisting of SEQ ID NOs: 3-9, 12-18 and 238-241.
17. The antibody according to paragraph 4, wherein the Fc region comprises the amino acid sequence selected from the group consisting of SEQ ID NOs: 21-37, 40-56 and 243-251.
18. The antibody of any one of paragraphs 1-17, wherein the VH comprises
[0028] (a) a heavy chain CDR1 having the amino acid sequence of SEQ ID NO: 57,
[0029] (b) a heavy chain CDR2 having the amino acid sequence of SEQ ID NO: 58, and
[0030] (c) a heavy chain CDR3 having the amino acid sequence of SEQ ID NO: 59; and wherein the VL comprises
[0031] (a) a light chain CDR1 having the amino acid sequence of SEQ ID NO: 60,
[0032] (b) a light chain CDR2 having the amino acid sequence of SEQ ID NO: 61, and
[0033] (c) a light chain CDR3 having the amino acid sequence of SEQ ID NO: 62.
   19. The antibody of any one of paragraphs 1-18, wherein the VH comprises the amino acid sequence selected from the group consisting of SEQ ID NO: 63, 64, 252 and 253.
   20. The antibody of any one of paragraphs 1-19, wherein the VL comprises the amino acid sequence of SEQ ID NO: 65 or 66.
   21. The antibody of any one of paragraphs 4-20, wherein the antibody further comprises a CH1 domain, wherein the CH1 domain is operably linked to
[0034] (a) the C-terminal end of the VH, and
[0035] (b) the N-terminal end of the hinge.
   22. The antibody of paragraph 21, wherein the CH1 domain comprises an amino acid sequence that is at least 80% identical to the amino acid sequence of any one of SEQ ID NOs: 67, 70, and 73.
   23. The antibody of any one of paragraphs 1-22, wherein the antibody comprises a linker between the VH and the Fc domain.
   24. The antibody of any one of paragraphs 4-22, wherein the antibody comprises a linker between the VH and the hinge.
   25. The antibody of paragraph 21 or 22, wherein the antibody comprises a linker between the VH and the CH1 domain.
   26. The antibody of any one of paragraphs 23-25, wherein the linker comprises the amino acid sequence of any one of SEQ ID NOs: 199-223 and 327-330.
   27. The antibody of any one of paragraphs 1-26, wherein the VH is operably linked to the amino acid sequence of any one of SEQ ID NOs: 3-9, 12-18, 21-37, 40-56 and 238-241 and 243-251.
   28. The antibody of any one of paragraphs 1-27, wherein the heavy chain comprises the amino acid sequence of any one of SEQ ID NOs: 121-132, 135-146, 149, 151-160, 163, 165-174, 266-277, and 279-288.
   29. The antibody of any one of paragraphs 1-28, wherein the light chain comprises the amino acid sequence of SEQ ID NO: 195 or 196.
   30. The antibody of any one of paragraphs 1-29, wherein the antibody is monoclonal.
   31. The antibody of any one of paragraphs 1-30, wherein the antibody is chimeric.
   32. The antibody of any one of paragraphs 1-31, wherein the antibody is humanized.
   33. The antibody of any one of paragraphs 1-17, 21-27 and 30, wherein the antibody is human.
   34. The antibody of any one of paragraphs 1-33, wherein the binding of the antibody to human CD154 inhibits the interaction between human CD154 and human CD40.
   35. The antibody of any one of paragraphs 1-34, wherein the antibody blocks the activation of one or more of B cells, macrophages, dendritic cells, or endothelial cells by inhibiting binding of CD154 to CD40.
   36. The antibody of any one of paragraphs 1-35, wherein the antibody has one or more of the following effects when administered to a subject:
[0036] (a) decreased risk of thrombosis or thromboembolic events compared to hu5c8 antibody;
[0037] (b) decreased activation of platelets expressing CD154;
[0038] (c) inhibition of CD154 shedding; and
[0039] (d) alteration of the expression or activity of downstream targets of CD154-CD40 signaling.
   37. The antibody of any one of paragraphs 1-36, wherein the antibody has a K_{D} of less than 50 pM for CD154, such as 5-25 pM or 9.5-23 pM.
   38. The antibody of any one of paragraphs 1-37, wherein the antibody does not comprise the amino acid sequence consisting of any one of SEQ ID NOs: 119, 120, 133, 134, 147, 148, 150, 161, 162, 164, 230, 234 and 278.
   39. An isolated nucleic acid molecule encoding a light chain and a heavy chain of an anti-CD154 antibody of any one of paragraphs 1-38.
   40. An isolated nucleic acid molecule encoding an anti-CD154 antibody comprising the amino acid sequence of any one of SEQ ID NOs: 121-132, 135-146, 149, 151-160, 163, 165-174, 195, 196, 266-277, and 279-288.
   41. A first isolated nucleic acid molecule and a second isolated nucleic acid molecule, wherein the first isolated nucleic acid molecule encodes a heavy chain comprising the amino acid sequence of any one of SEQ ID NOs: 121-132, 135-146, 149, 151-160, 163, 165-174, 266-277 and 279-288 and the second isolated nucleic acid molecule encodes a light chain comprising the amino acid sequence of SEQ ID NO: 195 or 196.
   42. A first isolated nucleic acid molecule and a second isolated nucleic acid molecule, wherein the first isolated and second nucleic acid molecules encode, respectively a heavy chain and a light chain of an anti-CD154 antibody of any one of paragraphs 1-38.
   43. A vector comprising the isolated nucleic acid molecule according to paragraph 39 or 40.
   44. A first vector and a second vector, wherein the first vector comprises the first isolated nucleic acid molecule according to paragraph 41 or 42, and the second vector comprises the second isolated nucleic acid molecule according to paragraph 41 or 42.
   45. A transformed cell comprising the isolated nucleic acid molecule according to paragraph 39 or 40, the first and second isolated nucleic acid molecules according to paragraph 41 or 42, the vector according to paragraph 43, or the first and second vectors according to paragraph 44.
   46. A pharmaceutical composition comprising an anti-CD154 antibody of any one of paragraphs 1-38 and a pharmaceutically acceptable carrier.
   47. A pharmaceutical composition comprising the isolated nucleic acid molecule according to paragraph 39 or 40, the first and second isolated nucleic acid molecules according to paragraph 41 or 42, the vector according to paragraph 43, or the first and second vectors according to paragraph 44, and a pharmaceutically acceptable excipient.
   48. A pharmaceutical composition comprising the transformed cell according to paragraph 45 and a pharmaceutically acceptable excipient.
   49. A method of inhibiting an immune response in a subject comprising administering to the subject a therapeutically effective amount of an antibody of any one of paragraphs 1-38 or the pharmaceutical composition of paragraph any one of paragraphs 46-48.
   50. The method of paragraph 49, wherein the immune response is a humoral response.
   51. The method of paragraph 50, wherein the immune response is an antibody-mediated response.
   52. The method of paragraph 49, wherein the immune response is a cell-mediated response.
   53. The method of paragraph 52, wherein the cell-mediated response is one or more of a cytotoxic T-cell mediated immune response, a macrophage mediated response, a natural killer (NK) cell mediated immune response or a cytokine mediated response.
   54. The method of paragraph 49, wherein the immune response is a mixed humoral and cell-mediated response.
   55. The method of paragraph 54, wherein the mixed response is one or more of an antibody-mediated response, a cytotoxic T-cell mediated immune response, a macrophage mediated response, a natural killer (NK) cell mediated immune response or a cytokine mediated response.
   56. The method of any one of paragraphs 49-55, wherein the subject is human.
   57. The method of any one of paragraphs 49-55, wherein the subject is non-human.
   58. The method of paragraph 57, wherein the subject is a monkey.
   59. The method of any one of paragraphs 49-58, wherein the subject has received or will receive a cell, tissue or organ transplant.
   60. The method of paragraph 59, wherein the transplant is an allogeneic transplant, autologous transplant or a xenogeneic transplant.
   61. The method of paragraph 59 or 60, wherein the cell is an engineered cell or an ex-vivo expanded cell.
   62. The method of paragraph 61, wherein one or more genes in the cell is modified using one or more techniques selected from a group consisting of transduction to express a cDNA, a CRISPR/Cas9 system, RNAi technology and retroviral technology.
   63. The method of paragraphs 61 or 62, wherein the cell is modified to express a chimeric antigen receptor (CAR) on its surface.
   64. The method of any one of paragraphs 59-63, wherein the cell is selected from a group consisting of a stem cell, a regulatory T (Treg) cell, a CAR-T cell, a CAR-B cell, a tumor-infiltrating lymphocyte (TIL).
   65. The method of any one of paragraphs 59-64, wherein the method comprises treating or preventing a transplant rejection in the subject.
   66. The method of paragraph 65, wherein the transplant rejection is an acute or a chronic humoral rejection of a grafted cell, tissue, or organ.
   67. The method of paragraph 65 or 66, wherein the transplant rejection is an acute or chronic graft rejection in a graft recipient of an allogeneic transplant or xenotransplant.
   68. The method of paragraph 66 or 67, wherein the method promotes a long-term graft survival of the grafted cell, tissue or organ, wherein said long-term graft survival is selected from the group consisting of:
[0040] (a) at least 6 months post-transplant;
[0041] (b) at least 1 year post-transplant; and
[0042] (c) at least 5 years post-transplant.
   69. The method of any one of paragraphs 65-68, wherein the transplant rejection is associated with a hematopoietic cell or bone marrow transplant, an allogeneic transplant of pancreatic islet cells, graft vs host disease, or a solid organ transplant selected from the group consisting of a heart transplant, a kidney transplant, a liver transplant, a lung transplant, a pancreas transplant, a kidney-pancreas transplant, a heart-lung transplant, kidney-heart transplant, a kidney-heart-pancreas transplant, a heart-liver transplant, a heart-liver-kidney transplant, a heart-lung-kidney transplant, a heart-lung-liver transplant, a lung-kidney transplant, a lung-liver transplant, a liver-intestines-pancreas transplant, an intestines-pancreas transplant, a liver-kidney-intestines-pancreas transplant, and a kidney-intestines transplant.
   70. The method of any one of paragraphs 56-58, wherein the subject has an immune-related disease, atherosclerotic disorder, or neurodegenerative disorder.
   71. The method of any one of paragraphs 56-58 and 70, wherein the subject had or is at risk of having a stroke, a transient ischemic attack (TIA), an aneurysm, or a dissecting aneurysm.
   72. The method of paragraph 70, wherein the immune-related disease is selected from a group consisting of type I diabetes, juvenile diabetes, autoimmune diabetes, autoimmune hemolytic anemia, rheumatoid arthritis, systemic lupus erythematosus (SLE), psoriasis, multiple sclerosis, inflammatory bowel disease, Addison's disease, Crohn's disease, Graves' disease, Sjögren's syndrome, Hashimoto's thyroiditis, myasthenia gravis, vasculitis, pernicious anemia, celiac diseases, Guillain-Barre syndrome, ankylosing spondylitis, primary biliary cirrhosis, lupus nephritis, Goodpasture's disease, polymyositis, dermatomyositis, psoriasis, temporal arteritis, Churg-Strauss syndrome, transverse myelitis, thyroiditis, ulcerative colitis, sarcoidosis, hemolytic anemia, idiopathic thrombocytopenic purpura, neuromyelitis optica spectrum disorder, paroxysmal nocturnal hemoglobinuria, atypical hemolytic uremic syndrome, Behcet's disease, diabetic retinopathy (DR), diabetic macular edema (DME), wet age-related macular degeneration (AMD), and macular edema following retinal vein occlusion (MEfRVO).
   73. The method of paragraph 70, wherein the immune-related disease is selected from a group consisting of severe acute respiratory syndrome (SARS), Middle East respiratory syndrome (MERS), coronavirus disease 2019 (COVID-19), cytokine release syndrome (CRS), and cytokine storm syndrome.
   74. The method of paragraph 70, wherein the immune-related disease is selected from a group consisting of acute respiratory distress syndrome (ARDS), pneumonia, bronchitis, pneumonitis, and chronic obstructive pulmonary disease (COPD).
   75. The method of paragraph 70, wherein the neurodegenerative disorder is selected from a group consisting of Alzheimer's disease, traumatic brain injury (TBI), chronic traumatic encephalitis (CTE), amyotrophic lateral sclerosis (ALS) and Parkinson's disease.
   76. The method of paragraph 70, wherein the atherosclerotic disorder is selected from a group consisting of angina pectoris, myocardial infarction, carotid stenosis, transient ischemic attacks and cerebral vascular accident (CVA).
   77. The method according to paragraph 70, wherein the immune-related disease is an allergic condition.
   78. The method according to paragraph 77, wherein the allergic condition is selected from the group consisting of allergic rhinitis, asthma, atopic eczema, anaphylaxis, insect venom allergy, drug allergy, and food allergy.
   79. The method of paragraph 49, wherein the immune response is a primary response or a secondary response.
   80. The method of any one of paragraphs 49-79, wherein the antibody is administered systemically.
   81. The method of paragraph 80, wherein the anti-CD154 antibody is administered subcutaneously, intravenously, intravitreally, orally, via inhalation, transdermally, or rectally.
   82. The method of any one of paragraphs 49-79, wherein the antibody is administered locally.
   83. The method of any one of paragraphs 49-82, wherein the anti-CD154 antibody is administered in combination with one or more additional agents selected from the group consisting of anti-thrombotic drugs, anti-platelet drugs, non-steroidal anti-inflammatory drugs (NSAIDs) and anti-allergy drugs.
   84. The method of paragraph 83, wherein the anti-CD154 antibody is administered prior to, subsequently to, or simultaneously with the one or more additional agents.
   85. The method of paragraph 83 or 84, wherein the anti-thrombotic drug is selected from a group consisting of a glycoprotein IIb/IIIa receptor antagonist, a direct or indirect factor Xa inhibitor and an anticoagulant.
   86. The method of paragraph 85, wherein the anticoagulant is selected from a group consisting of heparin, warfarin, rivaroxaban (XARELTO®), ximelgatran (EXANTA®), dabigatran (PRADAXA®), apixaban (ELIQUIS®), edoxaban (SAVAYSA®), enoxaparin (LOVENOX®), and fondaparinux (ARIXTRA®).
   87. The method of paragraph 85, wherein the glycoprotein IIb/IIIa receptor antagonist is selected from a group consisting abciximab (REOPRO®), rivaroxaban (XARELTO®), apixaban (ELIQUIS®), edoxaban (SAVAYSA®), idrabiotaparinux, tirofiban (AGGRASTAT®), and eptifibatide (INTEGRILIN®).
   88. The method of paragraph 85, wherein the direct or indirect factor Xa inhibitor is selected from a group consisting of apixaban (ELIQUIS®), idrabiotaparinux, fondaparinux ARIXTRA®), and rivaroxaban (XARELTO®).
   89. The method of paragraph 83 or 84, wherein the anti-platelet drug is selected from the group consisting of drugs inhibiting the TXA2 pathway, adenosine diphosphate (ADP) pathway inhibitors, thrombin inhibitors, Protease activated receptor-1 (PAR-1) inhibitors and phosphodiesterase (PDE) inhibitors.
   90. The method of paragraph 89, wherein the ADP pathway inhibitor is selected from a group consisting of clopidogrel (PLAVIX®), ticlopidine (TICLID®), prasugrel (EFFIENT®), ticagrelor (BRILINTA®), cangrelor (KENGREAL®) and elinogrel.
   91. The method of paragraph 89, wherein the PDE inhibitor is selected from a group consisting of dipyridamole (PERSANTINE®) and cilostazol (PLETAL®).
   92. The method of paragraph 83 or 84, wherein the NSAID is selected from the group consisting of acetylsalicylic acid (aspirin), celecoxib (CELEBREX®), diclofenac (VOLTAREN®, PENNSAID®, SOLARAZE®, ZIPSOR®, CATAFLAM®, ZORVOLEX®), diflunisal (DOLOBID®), etodolac (LODINE® SR, ECCOXOLAC®), ibuprofen (BRUFEN®, ADVIL®, MOTRIN®), indomethacin (INDOCIN®), ketoprofen (ORUDIS®), ketorolac (TORADOL®, ACULAR®, SPRIX®), nabumetone (RELAFEN®), naproxen (AFLAXEN®, ALEVE®, ANAPROX®, NAPRELAN®), oxaprozin (DAYPRO®, DAYRUN®, DURAPROX®), piroxicam (FELDENE®), salsalate (MONO-GESIC®, SALFLEX®, DISALCID®, SALSITAB®), sulindac (CLINORIL®), tolmetin (TOLECTIN®) and prasugrel (EFFIENT®).
   93. The method of any one of paragraphs 49-92, wherein the anti-CD154 antibody is administered in combination with one or more supplemental agents selected from the group consisting of immunosuppressive drugs, immunomodulatory drugs, anti-CD2 antibodies, anti-CD3 antibodies, anti-CD4 antibodies, anti-CD28 antibodies, anti-CD52 antibodies, mTOR inhibitors, calcineurin inhibitors, and antiviral drugs.
   94. The method of paragraph 93, wherein the anti-CD154 antibody is administered prior to, subsequently to, or simultaneously with the one or more supplemental agents.
   95. The method of paragraph 93 or 94, wherein the immunosuppressive drug or immunomodulatory drug is selected from the group consisting of cyclosporine A, tacrolimus (FK-506), doxorubicin (ADRIAMYCIN®), azathioprine (IMURAN®), busulfan (BUSULFEX®), cyclophosphamide (CYTOXAN®), fludarabine, 5-fluorouracil, methotrexate (OTREXUP®, RASUVO®, RHEUMATREX®, TREXALL®), mycophenolate mofetil (CELLCEPT®), mizoribine (BREDININ™), leflunomide, a nonsteroidal anti-inflammatory, adrenocortical steroids, rapamycin (RAPAMUNE®), deoxyspergualin, FTY720, muromonab-CD3 (ORTHOCLONE OKT3®), alemtuzumab (CAMPATH®, MABCAMPATH®, CAMPATH-1H®, LEMTRADA®), basiliximab (SIMULECT®), daclizumab (ZINBRYTA®), eculizumab (SOLIRIS®), rituximab (RITUXAN®, MABTHERA®), bortezomib (VELCADE®, CHEMOBORT®, BORTECAD®), siplizumab, anti-thymocyte globulin (THYMOGLOBULIN®, ATGAM®), leronlimab, siltuximbab (SYLVANT®), sarilumab (KEVZARA®), tocilizumab (ACTEMRA®), bevacizumab (AVASTIN®), ranibizumab (LUCENTIS®), aflibercept (EYLEA®) and inhibitors of Bruton's tyrosine kinase (BTK), including zanubrutinib (BRUKINSA®), acalabrutinib (CALQUENCE®) and ibrutinib (IMBRUVICA®).
   96. The method of paragraph 93 or 94, wherein the mTOR inhibitor is selected from the group consisting of rapamycin (RAPAMUNE®), everolimus (AFINITOR®), temsirolimus (TORISEL®), ridaforolimus, and deforolimus.
   97. The method of paragraph 93 or 94, wherein the calcineurin inhibitor is selected from the group consisting of cyclosporine (NEORAL®, SANDIMMUNE®, GENGRAF®, RESTASIS®), tacrolimus (FK506, ENVARSUS®, HECORIA®, PROGRAF® PROTOPIC®, ASTRAGRAF®), and pimecrolimus (ELIDEL®).
   98. The method of paragraph 93 or 94, wherein the antiviral drug is selected from the group consisting of ribavirin, interferon (alfacon-1), chloroquine, hydroxychloroquine, EIDD-2801, EIDD-1931, GS-5734, GS-441524, ivermectin, favipiravir, indomethacin, chlorpromazine, penciclovir, nafomostat, nitazoxanide and remdesivir.
   99. A method of inducing hematopoietic chimerism in a transplant recipient, the method consisting of administering to the recipient one or more doses of an anti-CD154 antibody, and transplanting into the recipient hematopoietic stem cells, thereby inducing hematopoietic chimerism in the recipient,

[0043] wherein the anti-CD154 antibody is an anti-CD154 antibody according to any one of paragraphs 1-38.

100. The method of paragraph 99, wherein the anti-CD154 antibody is administered prior to, subsequently to or simultaneously with the transplantation of the hematopoietic stem cells.
101. The method of paragraph 99 or 100, wherein the anti-CD154 antibody is administered at a dose of 5-50 mg/kg.
102. The method of any one of paragraphs 99-101, wherein the anti-CD154 antibody is administered subcutaneously, intravenously, intravitreally, orally, via inhalation, transdermally, or rectally.
103. The method of any one of paragraphs 99-102, wherein the method further comprises a step of conditioning the transplant recipient prior to the transplantation with stem cells.
104. The method of paragraph 103, wherein the anti-CD154 antibody is administered prior to, subsequent to, or simultaneously with the conditioning step.
105. The method of paragraph 103 or 104, wherein the conditioning step is selected from a group consisting of total body irradiation, administration of one or more BCL-2 inhibitors, administration of busulfan, administration of fludarabine phosphate, administration of cyclophosphamide, administration of immunosuppressive one or more T cell-depleting antibodies, administration of cyclosporine A (CsA), administration of tacrolimus (FK-506), administration of one or more interleukin-2 (IL-2) receptor inhibitors, administration of IL-15 receptor inhibitors, administration of rapamycin, administration of one or more anti-αβ T cell receptor antibodies, and administration of one or more CD122 antagonists, administration of kidney donor-derived CD34+ hematopoietic stem cells and CD3+ T-cells (MDR-101 cellular therapy) or a combination thereof.
106. The method of paragraph 105, wherein the one or more T cell-depleting antibodies are selected from the group consisting of anti-CD4, anti-CD8, anti-CD45, anti-CTLA4, anti-CD20, and anti-CD33 antibodies or a combination thereof.
107. The method of paragraph any one of paragraphs 99-106, wherein the transplant recipient has cancer.
108. The method of paragraph any one of paragraphs 99-107, wherein the transplant is a bone marrow transplant.
109. A method of inducing central tolerance in a transplant recipient, the method comprising administering to the recipient one or more doses of an anti-CD154 antibody, transplanting into the recipient hematopoietic stem cells, and transplanting a donor tissue into the recipient, wherein the hematopoietic stem cells produce immune cells that are tolerant of the donor tissue, thereby inducing central tolerance in the recipient, and

[0044] wherein the anti-CD154 antibody is an anti-CD154 antibody according to any one of paragraphs 1-38.

110. The method of paragraph 109, wherein the anti-CD154 antibody is administered prior to, subsequently to or simultaneously with the transplantation of the hematopoietic stem cells.
111. The method of paragraph 109 or 110, wherein the anti-CD154 antibody is administered at a dose of 5-50 mg/kg.
112. The method of any one of paragraphs 109-111, wherein the anti-CD154 antibody is administered subcutaneously, intravenously, intravitreally, orally, via inhalation, transdermally, or rectally.
113. The method of any one of paragraphs 109-112, wherein the method further comprises one or more treatments to condition the recipient for hematopoietic stem cell transplantation.
114. The method of paragraph 113, wherein the one or more treatments to condition the recipient for hematopoietic stem cell transplantation is selected from a group consisting of total body irradiation, administration of abatacept, administration of one or more BCL-2 inhibitors, administration of busulfan, administration of fludarabine phosphate, administration of cyclophosphamide, administration of one or more immunosuppressive T cell-depleting antibodies, administration of cyclosporine A (CsA), administration of FK-506, administration of one or more interleukin-2 (IL-2) inhibitors, administration of rapamycin, administration of one or more anti-αβ T cell receptor antibodies, and administration of one or more CD122 antagonists or a combination thereof.
115. The method of paragraph 114, wherein the one or more T cell-depleting antibodies are selected from the group consisting of anti-CD4, anti-CD8, anti-CD45, anti-CTLA4, anti-CD20, and anti-CD33 antibodies or a combination thereof.
116. A method of inhibiting xenotransplant rejection in a subject, comprising administering to the subject an effective amount of an anti-CD154 antibody, wherein the anti-CD154 antibody is an anti-CD154 antibody according to any one of paragraphs 1-38.
117. The method of paragraph 116, wherein the anti-CD154 antibody is administered at a dose of 5-50 mg/kg.
118. The method of paragraph 116 or 117, wherein the xenotransplant is from a non-human donor selected from a group consisting of a pig, a mini-swine, and a non-human primate.
119. The method of paragraph 118, wherein the non-human donor is a pig or mini-swine that has been engineered to decrease or eliminate expression of one or more genes selected from the group consisting of porcine endogenous retroviruses (PERV), α-1,3-galactosyltransferase (GGTA1), cytidine monophosphate-N-acetylneuraminic acid hydroxylase (CMAH), β1,4-N-acetylgalactosaminyltransferase (β4GalNT2), and MHC class I.
120. The method of paragraph 119, wherein the PERV is a PERV A, a PERV B, or a PERV C.
121. The method of paragraph 119 or 120, wherein the expression of all PERV genes has been eliminated in the pig or mini-swine.
122. The method of any one of paragraphs 119-121, wherein the expression of the one or more genes is decreased or eliminated using CRISPR/Cas9 gene editing.
123. The method of any one of paragraphs 118-122, wherein the non-human donor has been engineered to express one or more human proteins selected from the group consisting of a complement regulatory protein, human α-galactosidase, a coagulation regulatory protein, a human anti-inflammatory protein, and human CTLA-4-Ig or a combination thereof.
124. The method of paragraph 123, wherein the one or more human proteins are expressed in all tissues of the non-human donor.
125. The method of paragraph 123, wherein the one or more human proteins are expressed in a tissue-specific manner in the non-human donor.
126. The method of any one of paragraphs 123-125, wherein the complement regulatory protein is selected from the group consisting of human decay-accelerating factor (CD55), membrane cofactor protein (CD46) and CD59.
127. The method of any one of paragraphs 123-125, wherein the coagulation regulatory proteins are selected from the group consisting of thrombomodulin, endothelial protein C receptor, tissue factor pathway inhibitor, CD39, and CD73.
128. The method of any one of paragraphs 123-125, wherein the human anti-inflammatory proteins are selected from the group consisting of hemeoxygenase-1 (HO-1) and A20.
129. The method of any one of paragraphs 116-128, wherein the xenotransplant rejection is associated with a solid organ transplant selected from the group consisting of a heart transplant, a kidney transplant, a liver transplant, a lung transplant, a pancreas transplant, a kidney-pancreas transplant, a heart-lung transplant, kidney-heart transplant, a kidney-heart-pancreas transplant, a heart-liver transplant, a heart-liver-kidney transplant, a heart-lung-kidney transplant, a heart-lung-liver transplant, a lung-kidney transplant, a lung-liver transplant, a liver-intestines-pancreas transplant, an intestines-pancreas transplant, a liver-kidney-intestines-pancreas transplant, and a kidney-intestines transplant.
130. The method of paragraph 49, wherein the immune response is complement-mediated.
131. The method of any one of paragraphs 49-98, wherein the anti-CD154 antibody is administered in combination with one or more fusion peptides that bind to and block the function of CD28, optionally selected from the group consisting of abatacept and belatocept (NULOJIX®).

### BRIEF DESCRIPTION OF THE DRAWINGS

[0045] FIG. 1 provides the titer and viability (%) of the five stable pools of CHO cells expressing anti-CD154 mAb (TNX01-TNX05) in 100 mL fed-batch production.

[0046] FIG. 2 provides SDS-PAGE analysis of each of anti-CD154 mAbs (TNX01-TNX05) obtained during the process of protein generation and purification. MW is the protein standard which indicates the molecular weight of each band obtained on the Sypro Ruby stained gel under non-reducing conditions. The TNX04 antibody appears as two separate bands on the non-reducing gel because it contains Cys-Ser substitutions that disrupt the disulfide bonds that connect the heavy chain and light chain and that connect the two heavy chains.

[0047] FIGS. 3(a)-3(e) provide representative CD154 sensorgrams for TNX01-TNX05, respectively, binding to cognate antigen CD154. Avidity measurements of purified anti-CD154 antibodies were performed by surface plasmon resonance (SPR) using the BIACORE® T200 instrument and a sensorchip CM-5. The change in refractive index was plotted as response in resonance units (RUs) versus time in the sensorgram using the Biacore T200 Evaluation software. For each sensorgram, the CD154 binding data was fit using a 1:1 binding model. FIG. 3(f) summarizes the resulting Ka (1/Ms), Kd (1/s) and KD (M) values.

[0048] FIGS. 4(a) and 4(b) provide the kinetic results based on the 1:1 binding model fit to the sensorgrams of FIG. 3. Average values for sCD40L (i.e. sCD154) Binding Affinity KD (M) are shown with standard deviations (n=3) for each of the TNX01-TNX05 anti-CD154 antibodies.

[0049] FIGS. 5(a)-5(e) provide representative CD154 sensorgrams for TNX01-TNX05, respectively, binding to FcγRIA (CD64). Avidity measurements of purified anti-CD154 antibodies were performed by surface plasmon resonance (SPR) using the BIACORE® T200 instrument and a sensorchip CM-5. The change in refractive index was plotted as response in resonance units (RUs) versus time in the sensorgram using the Biacore T200 Evaluation software. For each sensorgram, the CD154 binding data was fit using a 1:1 binding model. FIG. 5(f) summarizes the resulting Ka (1/Ms), Kd (1/s) and KD (M) values.

[0050] FIGS. 6(a) and 6(b) provide the kinetic results based on the 1:1 binding model fit to the sensorgrams of FIG. 5. Average values for FcγRIA (CD64) Binding Affinity KD (M) are shown with standard deviations (n=3). A lower KD value indicates tighter binding between the antibody and FcγRIA, such that TNX02 binds FcγRIA the tightest, followed by (in order) TNX04, TNX05, TNX01, and TNX03.

[0051] FIGS. 7(a) and 7(b) provide the kinetic results based on the 1:1 binding model fit to the sensorgrams of FIG. 3. Average values for binding affinity of TNX02, TNX04, and TNX05 KD (M) to a low-affinity FcγR panel (CD16aF, CD16aV, CD32aH, CD32bF) are shown with standard deviations (n=3). The KD values for TNX01 and TNX03 could not be determined because these variants showed negligible binding activity. A lower KD value indicates tighter binding between the antibody and FcγR.

[0052] FIGS. 8(a) and 8(b) provide graphical representations of the mean fluorescence intensity (MFI) as a function of concentration (nM) in the binding of each antibody to the surface of (a) Jurkat D1.1 cells, which are CD154 positive, or (b) Jurkat cells, which are CD154 negative, as obtained by flow cytometry. FIG. 8(c) provides the binding characteristics (Bmax (maximum number of binding sites), h (Hill slope) and apparent Kd (ligand concentration that binds to half the receptor sites at equilibrium)) of each anti-CD154 antibody (TNX01-TNX05), a positive control antibody (mouse anti-human CD40L or CD140) and a negative control antibody (SYNAGIS®) to D1.1 cells (CD154 positive) as analyzed using high-throughput FACS cell-binding assay conducted with the various antibodies.

[0053] FIGS. 9(a), 9(b), and 9(c) provide maps of various amino acid modifications for the Fc region of IgG1 (FIG. 9(a)), IgG2 (FIG. 9(b)), and IgG4 (FIG. 9(c)) that may modify (e.g., reduce) FcR effector functions.

[0054] FIG. 10 provides SDS-PAGE analysis of each of anti-CD154 mAbs (TNX06-TNX13) obtained during the process of protein generation and purification. STD is the protein standard which indicates the molecular weight of each band obtained on the Sypro Ruby stained gel under non-reducing (NR) or reducing (R) conditions. The lanes in the gel, from left to right, are as follows: (1) STD; (2) TNX06(NR); (3) TNX06(R); (4) STD; (5) TNX07(NR); (6) TNX07(R); (7) STD; (8) TNX08(NR); (9) TNX08(R); (10) STD; (11) TNX09(NR); (12) TNX09(R); (13) STD; (14) TNX10(NR); (15) TNX10(R); (16) STD; (17) TNX11(NR); (18) TNX11(R); (19) STD; (20) TNX12(NR); (21) TNX12(R); (22) STD; (23) TNX13(NR); (24) TNX13(R); (25) STD; (26) STD.

[0055] FIG. 11 provides the surface plasmon resonance (SPR) comparability scores of sCD154 binding by TNX06-13 compared to that of TNX02. The scores as expressed as percentage similarity by pairwise comparison.

[0056] FIG. 12(a) summarizes the data generated from the surface plasmon resonance (SPR) analysis and the calculated apparent KD values (affinity; ratio of kd to ka) for TNX06-13 binding to FcγRIA (CD64) and TNX02. FIGS. 12(b) and 12(c) show the average values for FcγRIA (CD64) Binding Affinity KD (M) with standard deviations (n=3). A lower KD value indicates tighter binding between the antibody and FcγRIA, such that TNX02 binds FcγRIA the tightest, followed by (in order) TNX13, TNX07, TNX12, TNX06, TNX10, TNX08, and TNX09.

[0057] FIG. 13(a) provides the mean KD values based on the sensorgram data obtained for TNX02 and TNX06-13 binding to low-affinity FcγRs. FIG. 13(b) shows the average values for binding affinity of TNX02, TNX06-10, TNX12 and TNX13 KD (M) to a low-affinity FcγR panel (CD16aF, CD16aV, CD32aH, CD32bF) with standard deviations (n=3). The KD values for TNX11 and for some FcγR panel components for TNX09, TNX10, and TNX12 could not be determined because these variants showed negligible binding activity. A lower KD value indicates tighter binding between the antibody and FcγR.

[0058] FIG. 14(a) provides graphical representations of the mean fluorescence intensity (MFI) as a function of concentration (nM) in the binding of each antibody to the surface of Jurkat D1.1 cells, which are CD154 positive. FIG. 14(b) provides the binding characteristics (Bmax (maximum number of binding sites), h (Hill slope) and apparent Kd (ligand concentration that binds to half the receptor sites at equilibrium)) of each anti-CD154 antibody (TNX06-TNX13), a positive control antibody (mouse anti-human CD40L or CD154) and a negative control antibody (SYNAGIS®) to D1.1 cells (CD154 positive) as analyzed using high-throughput FACS cell-binding assay conducted with the various antibodies.

### DETAILED DESCRIPTION OF THE INVENTION

### Definitions and General Techniques

[0059] Unless otherwise defined herein, scientific and technical terms used in this application shall have the meanings that are commonly understood by those of ordinary skill in the art. Generally, nomenclature used in connection with, and techniques of, cell and tissue culture, molecular biology, immunology, microbiology, genetics and protein and nucleic acid chemistry and hybridization described herein are those well-known and commonly used in the art. In case of conflict, the present specification, including definitions, will control.

[0060] The methods and techniques of the present disclosure will employ, unless otherwise indicated, conventional techniques of molecular biology (including recombinant techniques), microbiology, cell biology, biochemistry and immunology, which are within the skill of the art. Such techniques are explained fully in the literature, such as Green M R & Sambrook J. Molecular Cloning: A Laboratory Manual, 4th ed., Cold Spring Harbor Laboratory Press, Cold Spring Harbor, N.Y. (2012); Ausubel et al., Short Protocols in Molecular Biology: A Compendium of Methods from Current Protocols in Molecular Biology, 5^{th} ed., Wiley, John & Sons, Inc. (2002); Harlow and Lane Using Antibodies: A Laboratory Manual, Cold Spring Harbor Laboratory Press, Cold Spring Harbor, N.Y. (1998); and Coligan et al., Short Protocols in Protein Science, Wiley, John & Sons, Inc. (2003); Oligonucleotide Synthesis (M. J. Gait, ed., 1984); Methods in Molecular Biology, Humana Press; Cell Biology: A Laboratory Notebook (J. E. Cellis, ed., 1998) Academic Press; Animal Cell Culture (R. I. Freshney, ed., 1987); Introduction to Cell and Tissue Culture (J. P. Mather and P. E. Roberts, 1998) Plenum Press; Cell and Tissue Culture: Laboratory Procedures (A. Doyle, J. B. Griffiths, and D. G. Newell, eds., 1993-1998) J. Wiley and Sons; Methods in Enzymology (Academic Press, Inc.); Gene Transfer Vectors for Mammalian Cells (J. M. Miller and M. P. Calos, eds., 1987); Current Protocols in Molecular Biology (F. M. Ausubel et al., eds., John Wiley & Sons, Inc., 2003); PCR: The Polymerase Chain Reaction, (Mullis et al., eds., 1994), each of which is incorporated herein by reference.

[0061] Enzymatic reactions and purification techniques are performed according to manufacturer's specifications, as commonly accomplished in the art or as described herein. The nomenclature used in connection with, and the laboratory procedures and techniques of, analytical chemistry, synthetic organic chemistry, and medicinal and pharmaceutical chemistry described herein are those well known and commonly used in the art.

[0062] Standard techniques are used for chemical syntheses, and chemical analyses.

[0063] Throughout this specification and embodiments, the word “comprise,” or variations such as “comprises” or “comprising,” will be understood to imply the inclusion of a stated integer or group of integers but not the exclusion of any other integer or group of integers. “Comprising” may be synonymous with “including” or “containing.”

[0064] It is understood that wherever embodiments are described herein with the language “comprising,” otherwise analogous embodiments described in terms of “consisting of” and/or “consisting essentially of” are also provided. As used herein, “consisting of” is a closed term that includes only the specific elements recited, and “consisting essentially of” includes the specific elements recited and may include additional unrecited, nonmaterial elements.

[0065] The term “including” is used to mean “including but not limited to.” “Including” and “including but not limited to” are used interchangeably.

[0066] Any example(s) following the term “e.g.” or “for example” is not meant to be exhaustive or limiting.

[0067] Unless otherwise required by context, singular terms shall include pluralities and plural terms shall include the singular.

[0068] The articles “a”, “an” and “the” are used herein to refer to one or to more than one (i.e., to at least one) of the grammatical object of the article. By way of example, “an element” means one element or more than one element. As used herein, the term “about” modifying the quantity of an ingredient, parameter, calculation, or measurement in the compositions of the disclosure or employed in the methods of the disclosure refers to variation in the numerical quantity that can occur, for example, through typical measuring and liquid handling procedures used for making isolated polypeptides or pharmaceutical compositions in the real world; through inadvertent error in these procedures; through differences in the manufacture, source, or purity of the ingredients employed to make the compositions or carry out the methods; and the like without having a substantial effect on the chemical or physical attributes of the compositions or methods of the disclosure. Such variation can be within an order of magnitude, typically within 10%, more typically still within 5%, of a given value or range. The term “about” also encompasses amounts that differ due to different equilibrium conditions for a composition resulting from a particular initial mixture. Whether or not modified by the term “about”, the paragraphs include equivalents to the quantities. Reference to “about” a value or parameter herein includes (and describes) embodiments that are directed to that value or parameter per se. For example, description referring to “about X” includes description of “X.” Numeric ranges are inclusive of the numbers defining the range.

[0069] Notwithstanding that the numerical ranges and parameters setting forth the broad scope of the disclosure are approximations, the numerical values set forth in the specific examples are reported as precisely as possible. Any numerical value, however, inherently contains certain errors necessarily resulting from the standard deviation found in their respective testing measurements. Moreover, all ranges disclosed herein are to be understood to encompass any and all subranges subsumed therein. For example, a stated range of “1 to 10” should be considered to include any and all subranges between (and inclusive of) the minimum value of 1 and the maximum value of 10; that is, all subranges beginning with a minimum value of 1 or more, e.g., 1 to 6.1, and ending with a maximum value of 10 or less, e.g., 5.5 to 10.

[0070] Exemplary methods and materials are described herein, although methods and materials similar or equivalent to those described herein can also be used in the practice or testing of the present application. The materials, methods, and examples are illustrative only and not intended to be limiting.

### Definitions

[0071] The following terms, unless otherwise indicated, shall be understood to have the following meanings:

[0072] As used herein, the term “antibody” or “Ab” refers to an immunoglobulin molecule (e.g., complete antibodies, antibody fragment or modified antibodies) capable of recognizing and binding to a specific target or antigen, such as a carbohydrate, polynucleotide, lipid, polypeptide, etc., through at least one antigen recognition site, located in the variable region of the immunoglobulin molecule. As used herein, the term “antibody” can encompass any type of antibody, including but not limited to monoclonal antibodies, polyclonal antibodies, human antibodies, engineered antibodies (including humanized antibodies, fully human antibodies, chimeric antibodies, single-chain antibodies, artificially selected antibodies, CDR-granted antibodies, etc) that specifically bind to a given antigen (e.g. CD154). Further, “antibody” and/or “immunoglobulin” (Ig) refers to a polypeptide comprising at least two heavy (H) chains (about 50-70 kDa) and two light (L) chains (about 25 kDa), optionally inter-connected by disulfide bonds. There are two types of light chain: λ and κ. In humans, λ and κ light chains are similar, but only one type is present in each antibody. Heavy chains are classified as mu, delta, gamma, alpha, or epsilon, and define the antibody's isotype as IgM, IgD, IgG, IgA, and IgE, respectively. See generally, Fundamental Immunology Ch. 7 (Paul, W., ed., 2nd ed. Raven Press, N.Y. (1989)) (incorporated by reference in its entirety). The antibodies disclosed herein may be “functionally divalent” or “functionally monovalent”. In other words, the antibodies disclosed herein may have one antigen-binding site (monovalent) or two antigen-binding sites that are typically linked by disulfide bonds (divalent). In some embodiments, the anti-CD154 antibody is an IgG1 antibody. The anti-CD154 antibody may be an IgG2 antibody. Optionally, the anti-CD154 antibody is an IgG4 antibody. In some embodiments, the anti-CD154 antibody does not contain the final lysine residue at its C-terminal end in order to improve antibody stability. See e.g., Jiang G et al., J Pharm Sci. July; 105(7):2066-72 (2016); and Hintersteiner B. MAbs. 2016 November/December; 8(8):1548-1560 (2016). It is known in the art that each heavy chain and light chain is expressed comprising a leader sequence (also known as a signal sequence) at its N terminus, which is used to transport the newly synthesized chains into the endoplasmic reticulum. During post-translational processing, the leader sequences are removed and, therefore, are not present in the final chain or the mature antibody.

[0073] As used herein, the term “monoclonal antibody” or “mAb” refers to an antibody that is produced by an identical set of immune cells that are each clones of a unique parent cell. Monoclonal antibodies have monovalent affinity (i.e., they bind to the same epitope).

[0074] As used herein, the term “chimeric” antibodies refers to antibodies and antigen-binding fragments thereof comprising portions from two or more different species (e.g., mouse and human). Chimeric antibodies can be produced with mouse variable regions of desired specificity spliced onto human constant domain gene segments (for example, U.S. Pat. No. 4,816,567). In this manner, non-human antibodies can be modified to make them more suitable for human clinical application. The term “chimeric” may refer to a non-native sequence that has been manipulated to have one or more changes relative a native sequence. A chimeric antibody as used herein means an antibody that comprises regions from two or more different antibodies.

[0075] As used herein, the term “humanized” antibodies refers to chimeric antibodies from a non-human species, whose amino acid sequences have been modified to increase their similarity to antibodies produced in humans. In some embodiments, humanized antibodies are chimeric immunoglobulins, immunoglobulin chains, or fragments thereof (such as Fv, Fab, Fab′, F(ab′)2 or other antigen binding subsequences of antibodies) that contain minimal sequence derived from a non-human immunoglobulin. Optionally, humanized antibodies are derived from human immunoglobulins (i.e., recipient antibodies) in which residues from one or more complementary determining regions (CDRs) of the recipient antibody are replaced by residues from one or more CDRs of an antibody from a non-human species (donor antibody) having the desired specificity, affinity, and capacity. In some embodiments, the non-human species is a mouse, a rat, or a rabbit. Humanized or CDR-grafted mAbs are particularly useful as therapeutic agents for humans because they are not cleared from the circulation as rapidly as mouse antibodies and do not typically provoke an adverse immune reaction. Generally, a humanized antibody has one or more amino acid residues introduced into it from a non-human source.

[0076] In some embodiments, the chimeric antibody is a humanized antibody, e.g., a humanized anti-CD154 antibody. A humanized anti-CD154 antibody may comprise the amino acid sequence of one or more human framework regions and/or the amino acid sequence from at least a portion of a human constant region and further comprises sequences derived from a non-human antibody, for example non-human (e.g., mouse) CDR sequences. In some embodiments, the humanized antibody comprises a human constant region. Optionally, all of the framework regions in the humanized antibody are human framework regions.

[0077] Humanized antibodies can be generated by replacing non-human sequences of the Fv variable region that are not directly involved in antigen binding with equivalent sequences from human Fv variable regions. General methods for generating humanized antibodies are provided by Morrison, S. L., Science, 229:1202-1207 (1985), by Oi et al., BioTechniques, 4:214 (1986), by Jones et al., Nature 321:522-525 (1986), by Riechmann et al., Nature, 332:323-327 (1988), by Verhoeyen et al., Science, 239: 1534-1536 (1988)), by Staelens et al. 2006 Mol Immunol 43: 1243-1257, and by U.S. Pat. Nos. 5,225,539; 5,585,089; 5,693,761; 5,693,762; 5,859,205; and 6,407,213, each incorporated herein by reference. Those methods include isolating, manipulating, and expressing the nucleic acid sequences that encode all or part of immunoglobulin Fv variable regions from at least one of a heavy or light chain. Sources of such nucleic acid are well known to those skilled in the art and, for example, may be obtained from a hybridoma producing an antibody against a predetermined target, as described above, from germline immunoglobulin genes, or from synthetic constructs. The recombinant DNA encoding the humanized antibody can then be cloned into an appropriate expression vector. Humanized antibodies are typically human antibodies in which some CDR residues and possibly some framework residues are substituted by residues from analogous sites in rodent antibodies. See, for example, U.S. Pat. Nos. 5,225,539; 5,585,089; 5,693,761; 5,693,762; 5,859,205, each incorporated herein by reference. See also U.S. Pat. No. 6,180,370, and PCT International Publication No. WO 01/27160 (each incorporated herein by reference), where humanized antibodies and techniques for producing humanized antibodies having improved affinity for a predetermined antigen are disclosed. Furthermore, humanized and chimeric antibodies can be modified to comprise residues that are not found in the recipient antibody or in the donor antibody in order to further improve antibody properties, such as, for example, affinity or effector function.

[0078] As used herein, the term “human antibodies” refers to antibodies having variable and constant regions derived from human germline immunoglobulin sequences. Human antibodies can include amino acid residues not encoded by human germline immunoglobulin sequences (e.g., mutations introduced by random or site-specific mutagenesis in vitro or by somatic mutation in vivo). However, the term “human antibody” does not include antibodies in which CDR sequences derived from the germline of another mammalian species, such as a mouse, have been grafted onto human framework sequences (i.e., humanized antibodies). The term encompasses antibodies with sequences derived from human genes, but which have been changed, e.g. to decrease possible immunogenicity, increase affinity, eliminate cysteines that might cause undesirable folding, etc. The term also encompasses such antibodies produced recombinantly in non-human cells, which might impart glycosylation not typical of human cells. For the generation of human antibodies, see Mendez et al. Nature Genetics 15:146-156 (1997), Green and Jakobovits J. Exp. Med. 188:483-495 (1998), Lonberg, Nature Biotechnology, Vol. 23(5): 1117-1125 (2005); Jackobovits, “Therapeutic Antibodies from XenoMouse Transgenic Mice,” Chapter 7, Recombinant Antibodies for Immunotherapy, Cambridge University Press, New York, 2009, Murphy, “VelocImmune: Immunoglobulin Variable Region Humanized Mice,” Chapter 8, Recombinant Antibodies for Immunotherapy, Cambridge University Press, New York, 2009, Murphy et al., PNAS, 2014, vol. 111(14): 5153-5158, Bruggemann et al., Arch. Immunol. Ther. Exp., 2015, vol. 63:101-108, the disclosures of which are hereby incorporated by reference in their entirety. Human antibodies and methods of making them are further discussed in U.S. Pat. Nos. 5,939,598; 6,673,986; 6,114,598; 6,075,181; 6,162,963; 6,150,584; 6,713,610; 6,657,103; 6,586,251; as well as U.S. patent application publications US 2006-0015957 A1; and International Patent Publication Nos. WO 98/24893; and WO 2007/117410. The disclosures of each of the above-cited patents, applications, and references are hereby incorporated by reference in their entirety.

[0079] As used herein, the term “amino acid modification” refers to at least one amino acid substitution, insertion, deletion or mutation in an amino acid sequence compared to a wild-type amino acid sequence. Such modifications are within the ordinary skill of an artisan. Certain modifications, including amino acid deletions, substitutions and additions, of the Fc region have been demonstrated to alter the binding of the Fc region to its ligands and/or receptors resulting in a concomitant change in effector function (see, e.g., (Shields et al., J Biol Chem 276:6591-6604 (2001); Presta et al., Biochem Soc Trans 30:487-490 (2002); Escobar-Cabrera E et al. Antibodies. 6: 7 (2017); Duncan A R et al. Nature. 1988; 332: 738-740 (1988); Duncan A R et al. Nature. 332: 563-564 (1988); Hezareh M et al. J Virol. 75: 12161-12168 (2001); Oganesyan V et al. Acta Crystallogr D Biol Crystallogr; 64: 700-704 (2008); Schlothauer T et al. Protein Eng Des Sel. October; 29(10):457-466 (2016); Tao M H et al. J. Immunol. 143: 2595-2601 (1989); Von Kreudenstein T S et al. MAbs. 5(5):646-654 (2013); Wang X et al. Protein Cell. 9(1):63-73 (2018); U.S. Patent Publications 20040132101; 20070111260; 20110287032; 20180194860; U.S. Pat. No. 8,409,568; International Publication No. WO2017/177337, incorporated by reference in their entirety. An amino acid deletion is indicated as “Δ”, and an insertion is indicated as “In”. For instance, a deletion of the amino acid sequence from E216 to E222 is indicated as ΔE216-E222. An insertion of an arginine (R) between amino acid residues 234 and 235, e.g, would be indicated as InR234/235.

[0080] As used herein, the term “Fc domain” refers to the crystallizable fragment of an antibody following papain digestion. The Fc domain comprises two identical protein fragments derived from the hinge region and the second and third constant domains of IgA, IgD, and IgG antibody isotypes or the hinge region and the second, third, and fourth constant domains of IgM and IgE antibody isotypes. The Fc domain is the portion of an antibody that binds to cell surface Fc receptors and certain proteins of the complement system. The term “Fc region” refers to the Fc domain in combination with a hinge region. The hinger region is typically between the C-terminus of a variable domain and the N-terminus of the Fc domain. Although the boundaries of the Fc region may vary, the human IgG heavy chain Fc region as defined herein comprises residue E216 to its carboxyl-terminus of the CH3 domain (or the CH4 domain for IgM and IgE antibodies), wherein the numbering is in the EU format as in Edelman G M et al., (1969) Proc. Nat. Acad. USA, 63, 78-85. The “EU format as set forth in Edelman” refers to the residue numbering of the human IgG1 EU antibody as described in Edelman G M et al. supra. The human IgG2 and human IgG4 residue numbering is also in the EU format (See Dillon™, et al., J Biol Chem. June 6; 283(23):16206-15 (2008); Aalberse R C and Schuurman J et al., Immunology 105:9-19 (2002); and Scholthauer T et al, Protein Engineering, Design and Selection, 29(10): 457-466, (2016). The terms “Fc domain” and “Fc region” may refer to these sequences in isolation, or these sequences in the context of an antibody, antibody fragment, or Fc fusion protein. An Fc variant protein may be an antibody, Fc fusion, or any protein or protein domain that comprises an F domain or an Fc region. The amino acid sequence of a non-naturally occurring Fc domain or Fc region (also referred to herein as a “variant Fc domain” or a “variant Fc region,” respectively) may comprise an amino acid modification. Any new amino acid residue appearing in the sequence of a variant Fc domain or a variant Fc region as a result of an insertion or substitution may be referred to as a non-naturally occurring amino acid residue. Polymorphisms have been observed at a number of Fc domain positions, including but not limited to positions 270, 272, 312, 315, 356, and 358, and thus slight differences between the presented sequence and sequences in the prior art may exist.

[0081] As used herein, the term “linker” refers to a polypeptide sequence that joins two or more antibody domains. The characteristics of linkers and their suitability for particular purposes are known in the art. See, e.g., Chen et al. Adv Drug Deliv Rev. October 15; 65(10): 1357-1369 (2013) (disclosing various types of linkers, their properties, and associated linker designing tools and databases), which is incorporated herein by reference. The linker may be flexible, rigid, or in vivo cleavable. Preferably, the linker is flexible. Flexible linkers typically comprise small non-polar (e.g. Gly) or polar (e.g., Ser or Thr) amino acids. The most commonly used flexible linkers have sequences consisting primarily of stretches of Gly and Ser residues (“GS” linker). Optionally, flexible linkers comprise repeats of 5 Gly and Ser residues. Non-limiting examples of flexible linker include (Gly-Gly-Gly-Gly-Ser). (SEQ ID NO: 327), (Ser-Ser-Ser-Ser-Gly). (SEQ ID NO: 328), (Gly-Ser-Ser-Gly-Gly). (SEQ ID NO: 329), and (Gly-Gly-Ser-Gly-Gly). (SEQ ID NO: 330), where n may be any integer between 1 and 5. The linker is optionally between 5 and 25 amino acid residues long. Other suitable linkers may be selected from the group consisting of AS (SEQ ID NO: 214), AST (SEQ ID NO: 215), TVAAPS (SEQ ID NO: 216), TVA (SEQ ID NO: 217), ASTSGPS (SEQ ID NO: 218), KESGSVSSEQLAQFRSLD (SEQ ID NO: 219), EGKSSGSGSESKST (SEQ ID NO: 220), (Gly)6 (SEQ ID NO: 221), (Gly)8 (SEQ ID NO: 222), and GSAGSAAGSGEF (SEQ ID NO: 223). In general, a flexible linker should provide good flexibility and solubility and may serve as a passive linker to keep a distance between functional domains. The length of the flexible linkers can be adjusted to allow for proper folding or to achieve optimal biological activity of the fusion proteins.

[0082] As used herein, the twenty conventional amino acids and their abbreviations follow conventional usage. See Immunology—A Synthesis (2nd Edition, E. S. Golub and D. R. Gren, Eds., Sinauer Associates, Sunderland, Mass. (1991)), which is incorporated herein by reference.

[0083] A “conservative amino acid substitution” is one in which an amino acid residue is replaced with a different amino acid residue with similar biochemical properties (e.g., charge, hydrophobicity, or size). Typically, conservative amino acid substitutions do not substantially change a protein's functional properties. When comparing proteins with conservative substitutions, the percent sequence identity or degree of similarity may be adjusted to account for the conservative nature of the substitution. Such adjustments are well-known to those of skill in the art. See, e.g., Pearson, Methods Mol. Biol. 243:307-31 (1994).

[0084] Groups of amino acids with similar biochemical properties that may be used in conservative substitutions include 1) amino acid residues with aliphatic side chains: glycine, alanine, valine, leucine, and isoleucine; 2) amino acid residues with aliphatic-hydroxyl side chains: serine and threonine; 3) amino acid residues with amide-containing side chains: asparagine and glutamine; 4) amino acid residues with aromatic side chains: phenylalanine, tyrosine, and tryptophan; 5) amino acid residues with basic side chains: lysine, arginine, and histidine; 6) amino acid residues with acidic side chains: aspartic acid and glutamic acid; and 7) amino acid residues with sulfur-containing side chains: cysteine and methionine. Preferred conservative amino acids substitution groups include: valine-leucine-isoleucine, phenylalanine-tyrosine, lysine-arginine, alanine-valine, glutamate-aspartate, and asparagine-glutamine.

[0085] Each heavy chain is comprised of a heavy chain variable domain (VH) and multiple heavy chain constant domains (CH). For IgA, IgD, and IgG antibodies, the heavy chain typically comprises three domains: CH1, CH2 and CH3. For IgM and IgE antibodies, the heavy chain typically comprises four domains: CH1, CH2, CH3, and CH4. In some embodiments, the antibody comprises two domains: CH2 and CH3. Each light chain comprises a light chain variable domain (VL) and a light chain constant domain. The light chain typically comprises one domain: CL. Light chain variable domains are encoded by two gene segments: a variable (V) gene segment, which encodes the first 95-101 amino acids of the light chain, and a joining (J) gene segment, which encodes about 12 or more amino acids. Heavy chain variable domains are encoded by three gene segments and include a diversity (D) gene segment, which encodes about 3 or more amino acids, between the V and J gene segments. The VH and VL domains can be further subdivided into regions of hypervariability, called “complementarity determining regions” (CDR) that are separated by more conserved “framework regions” (FR). Each VH and VL is composed of three CDRs and four FRs, arranged from amino-terminus to carboxyl-terminus in the following order: FR1, CDR1, FR2, CDR2, FR3, CDR3, FR4.

[0086] The pairing of the variable domains of the heavy chain and light chain (VH and VL) forms the antibody binding site that interacts with an antigen. Thus, each antibody typically has two binding sites. With the exception of multifunctional/multispecific (e.g., bifunctional or bispecific) antibodies, the two binding sites are the same. The Fc regions of the constant regions of the antibodies typically mediate the binding of antibodies to host tissues and factors, including various cells of the immune system (e.g., effector cells) and the first component (C1q) of the classical complement system.

[0087] Residues in a variable domain are numbered according to Edelman, also known as the EU numbering system, which is a numbering system used for heavy chain variable domains or light chain variable domains of the compilation of antibodies. See, Edelman Proc Natl Acad Sci USA. May; 63(1):78-85 (1969) and Kabat, E. A., Wu, T. T., Perry, H., Gottesman, K., and Foeller, C. (1991) Sequences of Proteins of Immunological Interest, 5th ed., NIH Publication No. 91-3242, Bethesda, Md. The Eu numbering of residues may be determined for a given antibody by alignment at regions of homology of the sequence of the antibody with a “standard” EU numbered sequence. Variable region CDRs (CDR L1, CDR L2, CDR L3, CDR H1, CDR H2, CDR H3) are identified according to contact based on crystal structures as defined in Karpusas et al. Structure. April 4; 9(4):321-9 (2001) and numbered in accordance with Edelman.

[0088] As used herein, the term “operably linked” refers to a first structure that has been placed in a functional relationship with a second structure. In the context of an antibody, a targeting structure may be operably linked to a structure that confers effector function. For example, the antigen-binding sequence of an antibody (e.g., variable region or VH or VL domain) may be operatively linked to a Fc region. In the context of a polynucleotide, a coding sequence may be operatively linked to a non-coding regulatory sequence, such as a promoter, an enhance, a signal sequence, a ribosome binding sequence, a splice acceptor sequence, a splice donor sequence, a termination sequence, etc. Two operably linked structures may be directly connected. Alternatively, two operably linked structures may be connected via one or more intermediary structures. For example, the antigen-binding portion of an antibody may be operably linked to the Fc region via a CH1 domain, a hinge region and/or a linker sequence. Similarly, operably linked non-coding regulatory sequences include both sequences that are contiguous with the coding sequence and sequences that act in trans or at a distance to control the coding sequence.

[0089] As used herein, the term “effector function” refers to the responses triggered by the interaction of antibodies and antibody-antigen complexes with cells of the immune system. These effector functions typically involve one of three major mechanisms: antibody-dependent cell-mediated cytotoxicity (ADCC), complement-dependent cytotoxicity (CDC), and opsonization and phagocytosis. In ADCC, Fc receptors on cytotoxic T cells, natural killer (NK) cells, or macrophages bind to the Fc regions of antibodies bound to a target cell, resulting in the secretion of substances, such as lytic enzymes, perforin, granzymes and tumor necrosis factor, which mediate the destruction of the target cell. In CDC, cell death is induced via activation of the complement cascade. See Daeron, Annu. Rev. Immunol., 15:203-234 (1997); Ward and Ghetie, Therapeutic Immunol., 2:77-94 (1995); and Ravetch and Kinet, Annu. Rev. Immunol. 9:457-492 (1991)). In opsonization and phagocytosis, the Fc region of a pathogen-bound antibody binds to a Fc receptor on the surface of a phagocyte, inducing phagocytosis. Such effector functions generally require the Fc region to be combined with a binding domain (e.g. an antibody variable domain) and can be assessed using standard assays that are known in the art (see, e.g., WO 05/018572, WO 05/003175, and U.S. Pat. No. 6,242,195). The Fc domain of the antibody mediates immune effector mechanisms. IgG antibodies activate effector pathways of the immune system by binding to members of the family of cell surface Fcγ receptors and to C1q of the complement system. Ligation of effector proteins by clustered antibodies triggers a variety of responses, including release of inflammatory cytokines, regulation of antigen production, endocytosis, and cell killing. These responses can provoke unwanted side effects such as inflammation and thrombosis. Accordingly, the present disclosure further relates to anti-CD154 antibodies, with modified effector functions, including antibodies in which one or more effector functions is reduced or eliminated. Without being bound by theory, it is believed that the anti-CD154 antibodies disclosed herein do not cause platelet activation or aggregation, because the antibodies comprising the mutated Fc regions do not bind FcγRIIa (also known as CD32a) on the platelet surface.

[0090] As used herein, the term “modified effector functions” refers to a Fc domain or an Fc region whose effector functions differ from a wild-type immunoglobulin Fc domain or Fc region. In some embodiments, one or more effector functions are reduced. Optionally, one or more effector functions are eliminated. The modified or reduced effector functions may be the result of lower binding affinity of the Fc region of the antibodies disclosed herein to effector molecules (e.g., FcγRs and/or C1q). For example, the anti-CD154 antibodies disclosed herein have reduced Fc receptor binding and complement activation compared with that of wild-type anti-CD154 antibodies. In some embodiments, a variant Fc region has a reduced antibody dependent cell-mediated cytotoxicity (ADCC). Effector function of an anti-CD154 antibody may be determined using one of many known assays, including the CDC assay, the ADCC assay, and the phagocytosis assay (see Xu-Rong Jiang et al, Nature Reviews Drug Discovery 10: 101-111 (2011) and Liu et al. The Journal of Biological Chemistry 292:1876-1883 (2017)). The anti-CD154 one or more of the antibody's effector functions may be reduced by at least 10%, 20%, 30%, 40%, 50%, 60%, 70%, 80%, 90%, or 95% relative to the effector function of a wild-type anti-CD154 antibody.

[0091] As used herein, the terms “CD154,” “CD40 ligand” and “CD40L” may be used interchangeably and refer to a mammalian protein that is primarily expressed on the surfaces of activated T cells, a soluble form of CD154 that is cleaved and released by activated T cells, is a member of the TNF superfamily, and binds the CD40 protein on antigen presenting cells. The term CD154 is intended to include recombinant CD154 and recombinant chimeric forms of CD154, which can be prepared by standard recombinant expression methods. In some embodiments, CD154 refers to human CD154.

[0092] As used herein, the term “inhibits” refers to the property of an antibody, or other molecule, that prevents the interaction of CD154 with CD40 or one that inhibits the binding of CD154 to CD40, or one that inhibits CD154 cleavage or shedding. In some embodiments, the antibody inhibits the binding of CD154 to CD40 by at least about 20%, preferably 40%, more preferably 60%, even more preferably 80%, or even more preferably 85%. Optionally, the antibody inhibits CD154 cleavage or shedding by at least about 20%, preferably 40%, more preferably 60%, even more preferably 80%, or even more preferably 85%. The inhibitory potential of anti-CD154 antibodies may be determined, for example, by their ability to inhibit up-regulation of a specific downstream target gene of CD40. For example, an anti-CD154 antibody may alter the expression, activity, or activation of kinases and genes that respond to CD154-CD40 signaling. An anti-CD154 antibody may inhibit the upregulation of CD23 expression, inhibit the upregulation of CD69 expression, inhibit the upregulation and activity of activation-induced cytidine deaminase (AID), inhibit rescue from apoptosis, inhibit upregulation of NF-κB activity, inhibit immunoglobulin isotype class switching, inhibit immunoglobulin CDR somatic hypermutation, alter the expression or activity of molecules within the TNF-receptor associated factor (TRAF) family such as TRAF-2, TRAF3 (also known as CRAF1), TRAF-5 and TRAF-6, kinase activation or inhibit the expression of other genes that respond to CD154-CD40 signaling. See, for example, Lederman, S., et al. J. Exp. Med. 175:1091-1101. (1992); Lederman, S., et al., Journal of Immunol. 149:3817-3826. (1992); Lederman, S., et al., Journal of Immunol. 152:2163. (1994); Cleary, A. M., et al., Journal of Immunol., 155:3329-3337 (1995); Cheng et al., Science. 267(5203):1494-8 (1995), Bankert K C et al., Journal of Immunol. 194:4319-4327 (2015), Ishida T K et al Proc Natl Acad Sci USA. 93(18):9437-42 (1996). Muramatsu, M K et al. 2000. Cell 102: 553 (2000); Buchta C M and Bishop G A., Journal of Immunol. 192(1):145-50. (2014), Arcipowski K M, et al. International Immunology. 26(3):149-58 (2014); Mambetsariev N, et al., Proc Natl Acad Sci USA. 113(4):1032-7 (2016), Arcipowski K M, Bishop G A., PLoS One. 7(7) (2012); Bishop G A. Journal of Immunol. 91(7):3483-5. (2013); Peters A L and Bishop G A. Journal of Immunol. 185(11):6555-62. (2010); Rowland S L, et al., Journal of Immunol. 179(7):4645-53. (2007), Benson R J, et al, European Journal of Immunol. 6(9):2535-43. (2006).

[0093] As used herein, the term “immune response” refers to reaction of body's immune system to the presence of a substance which is not recognized as a constituent of the body itself. An immune response may be a humoral immune response, a cell-mediated immune response, or a mixed humoral and cell-mediated immune response. A humoral response may be an antibody-mediated response. A cell-mediated response may be one or more of a cytotoxic T-cell mediated immune response, a macrophage mediated response, a natural killer (NK) cell mediated immune response or a cytokine mediated response. A mixed humoral and cell-mediated response may be one or more of an antibody-mediated response, a cytotoxic T-cell mediated immune response, a macrophage mediated response, a natural killer (NK) cell mediated immune response or a cytokine mediated response. The immune response can refer to an adaptive and/or an innate immune response. For the various types of immune responses, see David Chaplin J Allergy Clin Immunol February; 125(2 Suppl 2): S3-23 (2010).

[0094] As used herein, the term “affinity” of an antibody refers to the strength of interaction between the antibody's antigen-binding site and an epitope. An antibody's affinity for an antigen is typically expressed as the binding affinity equilibrium dissociation constant (K_{D}) of a particular antibody-antigen interaction. An antibody is said to specifically bind an antigen when the K_{D} is ≤1 mM, preferably ≤100 nM. High affinity antibodies are generally considered to have a K_{D} in the low nanomolar (10-9) range, and very high affinity antibodies are generally considered to have a K_{D} in picomolar (10⁻¹²) range. A K_{D} binding affinity constant can be measured by surface plasmon resonance, for example using the BIACORE® system (Pharmacia Biosensor AB, Uppsala, Sweden and Piscataway, N.J.) as discussed in Example 3. See also, Jonsson et al., Ann. Biol. Clin. 51:19-26 (1993); Jonsson et al., Biotechniques 11:620-627 (1991); Jonsson et al., J. Mol. Recognit. 8:125-131 (1995); Johnsson et al., Anal. Biochem. 198:268-277 (1991); Hearty S et al., Methods Mol Biol. 907:411-42 (2012), each incorporated herein by reference. The K_{D} may also be measured using a KINEXA® system (Sapidyne Instruments, Hanover, Germany and Boise, Id.).

[0095] As used herein, the terms “ka” or “affinity constant” and “kd” or “dissociation constant” refer to the amount of antibody-antigen complex that exists at the point when equilibrium concentration between antibody and antigen is reached. K_{D} is the ratio of kd to ka.

[0096] As used herein, the term “avidity” refers to the overall strength of an antibody-antigen complex. Avidity relates to three major parameters: the affinity of the antibody for the epitope; the valency of both the antibody and antigen; and the structural arrangement of the parts that interact. As used herein, “avidity” describes the increased affinity that occurs as result of multiple antigen binding sites on an immunoglobulin.

[0097] As used herein, the term “transplantation” refers to process of surgically removing a cell or tissue or organ from a first organism (the donor) and placing it into a second organism (the recipient). The donor may be a human or a non-human organism. In some embodiments, the donor is a primate. The donor may be a non-human primate. Optionally, the donor is a human. In some embodiments, the donor is a pig or mini-swine. The recipient may be a human or a non-human organism. Preferably, the recipient is a human. Optionally, the recipient is a non-human primate. The cell, tissue or organ being transferred is referred to as the “transplant” or “graft.” A “xenotransplant” refers to the transfer of a cell or tissue or organ from a donor of a certain species (such as a monkey or pig) into a recipient of a different species (such as a human).

[0098] As used herein, the term “engineered cell” refers to a cell that is modified from its natural state. An engineered cell may be modified using one or more techniques such as transduction to express a cDNA, a CRISPR/Cas9 system, RNAi technology and retroviral technology. For example, the cell may be modified to express a chimeric antigen receptor (CAR) on its surface. Examples of cells that may be transplanted include, but are not limited to a stem cell, a regulatory T (Treg) cell, a CAR-T cell (see Zhang, C et al. Biomarker Research (5)22. (2017), a CAR-B cell (Voss J E et al., Elife. January 17; 8. (2019), and a tumor-infiltrating lymphocyte (TIL) (Zhang L et al., Clin Cancer Res. May 15; 21(10):2278-88. doi: 10.1158/1078-0432.CCR-14-2085 (2015).

[0099] As used herein, the term “ex-vivo expanded cell” refers to a cell that is produced in an ex-vivo method to enhance the yield of that cell (such as a hematopoietic stem cell (HSC)) to be used in clinical applications, such as transplantation. See, e.g., Xie J, and Zhang C Sci China Life Sci. September; 58(9):839-53 (2015) which reviews the methods to expand the numbers of HSCs, including culture systems such as stroma/HSC co-culture, continuous perfusion and fed-batch cultures, and those supplemented with extrinsic ligands, membrane transportable transcription factors, complement components, protein modification enzymes, metabolites, or small molecule chemicals. The desired cell to be transplanted may also be expanded ex-vivo by applying endogenous Notch-signaling activators (see, e.g., Ex vivo expansion of human hematopoietic stem and progenitor cells Dahlberg A, et al., Blood 117:6083-6090 (2011).

[0100] As used herein, the term “transplant rejection” refers to the phenomenon that occurs when a transplanted cell, tissue, or organ from a donor is rejected by the recipient's immune system. The recipient's immune system may mount an adaptive immune response (cellular immunity) mediated by killer T cells inducing apoptosis of the donor cells, a humoral immunity mediated by activated B cells secreting antibodies, and/or an innate immune response mediated by phagocytes and soluble immune proteins (see Ochanda J et al., Cell Mol Immunol. April; 16(4):350-356 (2019); Koo J, and Wang H L. Surg Pathol Clin. June; 11(2):431-452 (2018); Wang H, and Yang Y G, Curr Opin Organ Transplant. April; 17(2):162-7 (2012); and da Silva M B, World J Transplant. February 24; 7(1):1-25 (2017)).

[0101] As used herein, the term “immune-related disease” refers to a condition in which the host immune system plays an integral role in mediated the disease and contributes to the progress of the disease. The term encompasses “autoimmune disease” which is a condition that arises when a specific adaptive immune response is mounted against self-antigens, as a result of which the effector pathways of immunity cause chronic inflammatory injury to tissues. Autoimmune diseases include, but are not limited to type I diabetes, juvenile diabetes, autoimmune diabetes, autoimmune hemolytic anemia, rheumatoid arthritis, systemic lupus erythematosus (SLE), psoriasis, multiple sclerosis, inflammatory bowel disease, Addison's disease, Crohn's disease, Graves' disease, Sjögren's syndrome, Hashimoto's thyroiditis, myasthenia gravis, vasculitis, pernicious anemia, celiac diseases, Guillain-Barre syndrome, ankylosing spondylitis, primary biliary cirrhosis, lupus nephritis, Goodpasture's disease, polymyositis, dermatomyositis, psoriasis, temporal arteritis, Churg-Strauss syndrome, transverse myelitis, thyroiditis, ulcerative colitis, sarcoidosis, hemolytic anemia, idiopathic thrombocytopenic purpura, neuromyelitis optica spectrum disorder, paroxysmal nocturnal hemoglobinuria, atypical hemolytic uremic syndrome, and Behcet's disease. Immune-related disease may also refer to an allergic disease which includes, but is not limited to allergic rhinitis, asthma, atopic eczema, anaphylaxis, insect venom allergy, drug allergy, and food allergy.

[0102] An immune-related disease may also refer to a dysfunctional immune response that causes or contributes to an inflammatory condition of organs, including but not limited to the lungs, heart, and kidney. For example, acute respiratory distress syndrome (ARDS) is a form of hypoxemic respiratory failure characterized by severe impairment in gas exchange and lung mechanics with a high case fatality rate. ARDS occurs when small blood vessels in the lung leak fluid that enter and may fill up the alveoli. Multiple immunologic processes involving neutrophils, macrophages, and dendritic cells partake in mediating tissue injury in ARDS. See Han, S, and Mallampalli R K. Journal of immunology 194, 3: 855-60 (2015). Other inflammatory conditions of the lungs include, but are not limited to pneumonia, bronchitis, pneumonitis, chronic obstructive pulmonary disease (COPD). See Moldoveanu, B et al. Journal of inflammation research (2):1-11 (2009).

[0103] Further, an immune-related disease, such as a dysfunctional immune response that causes or contributes to an inflammatory condition of organs, may be due to a viral infection. For example, ARDS, pneumonia, bronchitis, pneumonitis and COPD can occur in an infection by a virus, such as a cytomegalovirus, an Epstein-Barr virus, an influenza virus, a variola virus, an orthopoxvirus, or a coronavirus, such as SARS coronavirus (SARS-CoV), SARS-CoV-2, and MERS-CoV. Such viral infections may be associated with an inflammatory condition or a dysfunctional immune response such as cytokine release syndrome (CRS), or “cytokine storm” which is a severe immune reaction in which the host releases too many cytokines into the bloodstream too quickly. For example, the host may release a high amount of pro-inflammatory cytokines such as IP-10, MCP-1, MIP-1A, IL-6 and TNF-alpha into the bloodstream. (see Prompetchara E. et al., Asian Pac J Allergy Immunol, 38(1):1-9 (2020)). A cytokine storm can occur as a result of an infection, an autoimmune condition, or other disease. For example, a cytokine storm can occur in an infection by a virus, such as a cytomegalovirus, an Epstein-Barr virus, an influenza virus, a variola virus, SARS-CoV, SARS-CoV-2, and MERS-CoV. An immune-related disease may refer to a condition associated with a dysfunctional immune response, a cytokine storm or a cytokine storm syndrome in the host. Examples of such viral-mediated immune-related diseases include, but are not limited to, severe acute respiratory syndrome (SARS), Middle East respiratory syndrome (MERS), and coronavirus disease 2019 (COVID-19). The transition from pneumonia to ARDS has also been described as a “cytokine storm”. Many patients with severe COVID-19 lung disease manifest typical ARDS, but others manifest an atypical form of ARDS with relatively high compliance and well preserved lung gas volume, which may relate to loss of lung perfusion regulation, hypoxic vasoconstriction (Gattinoni L et al., Am J. Respir Crit Care Med. (2020) and/or microvascular thromboses and potentially disseminated intravascular coagulation (Phend C. MedPage Today, Infectious Disease. Apr. 8, 2020).

[0104] As used herein, the term “primary response” refers to the immune response of the body to an antigen that occurs on the first occasion that it is encountered. The term “secondary response” refers to the immune response that involves both B- and T cells, following a subsequent encounter with the same antigen and is more rapid leading to the activation of previously generated memory cells. A secondary response has some quantitative and qualitative differences from the primary response as reviewed in Ademokun and Dunn-Walters, Immune Responses: Primary and Secondary; John Wiley & Sons, (2010) and Kuby Immunology Macmillan; 8th edition (2018). In a primary immune response, the responding cell is a naïve B-cell and T-cell while in a secondary response, the responding cell is a memory cell.

[0105] As used herein, the term “hematopoietic chimerism” refers to the coexistence of both host and donor hematopoietic cells that arises due to the engraftment of donor pluripotent hematopoietic stem cells into the host. The host and donor cells may be tolerant of each other. Mechanisms of hematopoietic chimerism are known in the art. See Pasquet L, et al. Front Immunol. 2:80 (2011) and Nikolic B, and Sykes M, Immunol Res. 16(3):217-28. (1997) incorporated herein by reference. In some embodiments, such hematopoietic chimerism results in “central tolerance.” The mechanisms of “central tolerance” in such chimeras may involve central, intrathymic clonal deletion, selection of regulatory T cells and/or other related immune mechanisms. See, e.g., Nikolic B, and Sykes M, Immunol Res. 16(3):217-28. (1997) and Hogquist K A et al., Nature Reviews Immunology 5:772-782 (2005), incorporated herein by reference. In some embodiments, the hematopoietic stem cells are isolated or purified. Optionally, the hematopoietic stem cells are passenger cells that are transplanted with an organ, e.g. a kidney or liver transplant. Stem cells may be derived from bone marrow or fat cells/adipose tissue of the donor.

[0106] As used herein, the term “conditioning” or “conditioned” refers to the preparation of a recipient for stem cell transplantation, such as a hematopoietic cell transplantation. Gyurkocza B and Sandmaier BM Blood 124:344-353 (2014) provides a review of high-dose, reduced-intensity, and nonmyeloablative conditioning regiments and the most commonly used agents, such as total body irradiation, fludarabine phosphate, cyclophosphamide, T cell-depleting antibodies, cyclosporine A (CsA). Monoclonal antibodies, such as anti-CD20 Ab, anti-CD33 Ab, and anti-CD45 Ab, may also be used alone or in combination with conventional therapies as part of a conditioning regimen to prevent transplant rejection. See, e.g., Topcuoglu P et al; Progress in Stem Cell Transplantation; December (2015). Other agents that may be used in conditioning regimens include, but are not limited to, BCL-2 inhibitors (Perini G F et al., Journal of Hematology & Oncology 11:65 (2018) and anti-CTLA4 Abs (Pree I et al., Transplantation. March 15; 83(5): 663-667 (2007). Conditioning regimens may include chemotherapeutic agents including, but not limited to, Alemtuzumab (CAMPATH™), Busulfan, Carboplatin, Carmustine, Cyclophosphamide, Cytarabine (Ara-C), Daunorubicin, Etoposide (VP-16), Fludarabine, Melphalan, Rituximab, and Vincristine.

[0107] The term “isolated antibody” refers to an antibody that is at least partially free of the other biological molecules present in the cells used to produce them. The other biological molecules from which an isolated antibody is free include nucleic acid molecules, proteins, lipids, carbohydrates, cellular debris and culture medium. The term “isolated antibody” does not require, but does encompass, a complete absence of such other biological molecules. The term “isolated antibody” also does not refer to a complete absence of other molecules, such as water, buffers, salts or the components of pharmaceutical formulations. Thus, a molecule that is chemically synthesized or synthesized in a cell-free system will be “isolated” from its naturally associated components. A molecule may also be “isolated” using purification techniques well known in the art.

[0108] As used herein, the terms “nucleic acid,” “nucleic acid molecule” and “polynucleotide” are used interchangeably and refer a polymeric form of nucleotides of at least 10 bases in length. Polynucleotides may comprise ribonucleotides, deoxynucleotides, modified forms of either type of nucleotide, or a combination thereof. A polynucleotide may be single-stranded or double-stranded.

[0109] As used herein, the term “isolated polynucleotide” or “isolated nucleic acid molecule” as used herein means a polynucleotide of genomic, mRNA cDNA, or synthetic origin or some combination thereof, which (1) is not associated with all or a portion of polynucleotide with which the “isolated nucleic acid” is associated with in nature, (2) is operably linked to a polynucleotide to which it is not linked in nature, or (3) does not occur in nature as part of a larger sequence. An isolated polynucleotide “comprising” a specific sequence may also include coding sequences for other proteins or immunoglobulin chains, expression regulatory sequences or vector sequences.

[0110] Molecule purity or homogeneity may be assayed by a number of means well known in the art. For example, the purity of an antibody sample may be assayed using polyacrylamide gel electrophoresis and staining of the gel to visualize the antibody using techniques well known in the art. For certain purposes, higher resolution may be provided by using HPLC or other means well known in the art for purification. The purity of a nucleic acid sample may be assayed using the spectrophotometric absorbance of the sample 260 nm to that of 280 nm using techniques well known in the art. For certain purposes, higher resolution may be provided by using means well known in the art for purification.

[0111] Examples of isolated antibodies include, but are not limited to, an anti-CD154 antibody that has been affinity purified using CD154, and an anti-CD154 antibody that has been synthesized by a cell line in vitro.

[0112] The term “vector”, as used herein, refers to a construct, which is capable of delivering, and, preferably, expressing, one or more polynucleotide sequences of interest in a host cell. Non-limiting examples of vectors include viral vectors, naked DNA or RNA expression vectors, bacterial vectors, mammalian vectors, plasmids, cosmids, phage vectors, DNA or RNA expression vectors associated with cationic condensing agents, DNA or RNA expression vectors encapsulated in liposomes, and certain eukaryotic cells, such as producer cells. In some embodiments, the vectors autonomously replicate in a host cell into which they are introduced. Optionally, the vectors integrate into the genome of a host cell and are replicated along with the host genome. Vectors may be capable of directing the expression of coding sequences to which they are operably linked. Such vectors are referred to herein as “recombinant expression vectors” or “expression vectors”.

[0113] The term “host cell”, as used herein, refers to a cell into which a vector or a polynucleotide has been introduced. It should be understood that “host cell” includes not only the particular subject cell but also the progeny of such a cell. Because certain modifications may occur in succeeding generations due to either mutation or environmental influences, such progeny may not, in fact, be identical to the parent cell, but are still included within the scope of the term “host cell” as used herein, provided they still contain the vector, polynucleotide, or a portion thereof, either episomally or integrated into the host-cell genome.

[0114] The term “percent sequence identity” in the context of polynucleotide (or polypeptide) sequences is defined as the percentage of nucleic acid (or amino acid) residues in a candidate sequence that are identical with the nucleic acids (or amino acid residues) in the reference nucleotide (or polypeptide) sequence, after aligning the sequences and introducing gaps, if necessary, to achieve the maximum percent sequence identity, and not considering any conservative substitutions as part of the sequence identity. Such conservative substitutions are considered (in addition to identical residues) in calculating the “percent sequence similarity” of two sequences. Residue positions that are not identical but are similar differ by conservative amino acid substitutions.

[0115] Alignment for purposes of determining percent amino acid sequence identity, sequence similarity or sequence homology, such as between a wild type protein and a mutein thereof, can be achieved in various ways that are within the skill in the art, for instance, using publicly available sequence analysis computer software such as BLAST, BLAST-2, ALIGN, Megalign (DNASTAR), Gap, BESTFIT®, and other programs in programs in Wisconsin Package Version 10.0 or Genetics Computer Group (GCG), Madison, Wis. software. Those skilled in the art can determine appropriate parameters for aligning sequences, including any algorithms needed to achieve maximal alignment over the full length of the sequences being compared. Polypeptide sequences also can be compared using FASTA using default or recommended parameters. In the context of polypeptide sequences, FASTA takes the query amino acid sequence and searches a sequence database using local sequence alignment to identify similar sequences within the database (Pearson, Methods Enzymol. 183:63-98 (1990); Pearson, Methods Mol. Biol. 132:185-219 (2000); Pearson Curr Protoc Bioinformatics. March 24; 53:3.9.1-25 (2016); each herein incorporated by reference). BLAST, especially blastp or tblastn, using default parameters may be used to compare a query sequence to a database containing sequences from different organisms. See, e.g., Altschul et al., J. Mol. Biol. 215:403-410 (1990); Altschul et al., Nucleic Acids Res. 25:3389-402 (1997); Eser et al., PLoS One. 22; 9(12): e115445 (2014), each herein incorporated by reference.

[0116] A reference herein to a nucleotide sequence encompasses its complement unless otherwise specified. Thus, a reference to a nucleic acid having a particular sequence should be understood to encompass its complementary strand, with its complementary sequence.

[0117] The terms “patient,” “subject,” and “individual” are used interchangeably herein and refer to either a human or a non-human animal in need to treatment. These terms include mammals, such as humans, and primates (e.g., monkey). Optionally, the subject is a human. In some embodiments, the subject is in need of inhibition or reduction of an immune response.

[0118] The term “primate” refers to a mammal of the order primates, which includes the anthropoids and prosimians, characterized by refined development of the hands and feet, a shortened snout, and a large brain. The mammalian order Primates includes humans, apes, monkeys, and prosimians, or lower primates.

[0119] As used herein, the term “therapeutically effective amount” refers to that amount of the therapeutic agent being administered which will relieve to some extent one or more of the symptoms of the condition being treated. With respect to the treatment of transplant rejection, a therapeutically effective amount refers to that amount which has at least one of the following effects: reduces, inhibits or prevents acute or chronic rejection of the transplanted cell, tissue or organ and one or more symptoms associated with the rejection, prolongs graft survival, reduces thrombosis, reduces the risk of life-threatening infections, cancers and other complications, such as cardiovascular diseases, and kidney failure. See, for example, Romano et al. Front Immunol. 10:43 (2019) and Ingulli E. Pediatr Nephrol. 25(1):61-74 (2010) for mechanisms of cellular rejection in transplantation. With respect to the treatment of autoimmune disease and antibody-mediated inflammatory disease, a therapeutically effective amount refers to that amount which has at least one of the following effects: reduces one or more symptoms associated with the autoimmune disease such as fatigue, muscle aches, low fever, inflammation, skin rashes, etc.

[0120] The pharmaceutical compositions may include a therapeutically effective amount or a prophylactically effective amount of an antibody disclosed herein. A therapeutically effective amount of the antibody may vary according to factors such as the disease state, age, sex, and weight of the individual, and the ability of the antibody or antibody portion to elicit a desired response in the individual. A therapeutically effective amount is also one in which any toxic or detrimental effects of the antibody are outweighed by the therapeutically beneficial effects. It is routine in the art for the skilled artisan to determine a therapeutically effective amount of an antibody disclosed herein based on these factors. A “prophylactically effective amount” refers to an amount effective, at dosages and for periods of time necessary, to achieve the desired prophylactic result. Typically, since a prophylactic dose is used in subjects prior to transplantation or at an earlier stage of transplant rejection, the prophylactically effective amount may be less than the therapeutically effective amount.

[0121] As used herein, the terms “treat”, “treating” and “treatment” refer the administration of a therapeutic agent, such as a composition containing any of the antibodies disclosed herein, internally or externally to a subject or patient having one or more disease symptoms, or being suspected of having a disease, for which the agent has therapeutic activity. “Treat”, “treating” and “treatment” refer to therapeutic treatments and/or prophylactic treatments. Therapeutic treatment includes, e.g., a method of alleviating or reducing the severity of a condition or abolishing a condition and includes alleviating or reducing the severity of one or more symptoms of the condition. If the treatment is administered prior to clinical manifestation of a condition, the treatment is considered prophylactic. The alleviation or reduction of a disease symptom can be assessed by any clinical measurement typically used by physicians or other skilled artisans to assess the severity or progression of that symptom. The terms further refer to a postponement of development of one or more disease symptoms and/or a reduction in the severity of one or more disease symptoms. The terms further include ameliorating existing uncontrolled or unwanted disease symptoms, preventing additional disease symptoms, and ameliorating or preventing the underlying causes of such disease symptoms. Thus, the terms denote that a beneficial result has been conferred on the subject.

[0122] With respect to the treatment of transplant rejection, treatment may refer to the alleviation, reduction, or delay of rejection of the transplanted cell, tissue or organ or one or more symptoms associated with the rejection. Treatment may also result in prolonging graft survival, reducing thrombosis, and/or reducing the risk of life-threatening infections, cancers and other complications, such as cardiovascular diseases, and kidney failure. With respect to the treatment of autoimmune disease, treatment may refer to dampening of the body's immune responses and controlling the autoimmune reaction. With respect to the treatment of antibody-mediated inflammatory disease, treatment may refer to reducing one or more symptoms associated with the autoimmune disease such as fatigue, muscle aches, low fever, inflammation, skin rashes, etc. With regard to treatment with the antibodies disclosed herein, these terms may simply mean that the life expectancy and quality of life of an individual receiving a transplant or an individual affected with an autoimmune or inflammatory disease will be increased or that one or more of the symptoms associated with transplant rejection or the autoimmune or inflammatory disease will be reduced.

[0123] As used herein, the terms “prevent”, “preventing” and “prevention” refer to the prevention or delay of the recurrence or onset of, or a reduction in one or more symptoms of a condition in a subject as a result of the administration of an anti-CD154 antibody of the disclosure. For example, in the context of the administration of a therapy to a subject, “prevent”, “preventing” and “prevention” refer to the inhibition, reduction, or delay in the development or onset of the rejection of that transplant or associated thrombosis or the prevention or delay of the recurrence, onset, or development of one or more symptoms associated with the transplantation in a subject (e.g., a solid organ transplant) or the administration of a combination of therapies (e.g., a combination of a solid organ transplant and an immunosuppressant).

[0124] As used herein, the terms “administering” or “administration of” the antibodies or compositions of this disclosure to a subject refers to refers to contacting the antibodies or compositions to the subject or to a cell, tissue, organ, or biological fluid of the subject. Such administration can be carried out using one of a variety of methods known to those skilled in the art. For example, an antibody or a composition of this disclosure can be administered systemically or locally. In some embodiments, the composition can be administered subcutaneously, intravenously, intravitreally, orally, via inhalation, transdermally, or rectally. Administering can also be performed, for example, once, a plurality of times, and/or over one or more extended periods. In some embodiments, the administration includes both direct administration (including self-administration) and indirect administration, including the act of prescribing a drug.

[0125] As used herein, the term “highly stringent conditions” refers to hybridization to filter-bound DNA in 0.1× sodium chloride/sodium citrate (SSC) at 65° C., followed by one or more washes in 0.1×SSC, 0.1% SDS at 50-65° C. (Ausubel et al., eds., 1989, Current Protocols in Molecular Biology, Vol. I, Green Publishing Associates, Inc., and John Wiley & Sons, Inc., N.Y., at p. 2.10.3).

### Anti-CD154 Antibodies

[0126] A first aspect of the present disclosure provides isolated anti-CD154 antibodies with modified effector functions that bind to mammalian CD154, more preferably human CD154. In some embodiments, one or more effector functions are reduced. Optionally, one or more effector functions are eliminated. In some embodiments, the antibodies with one or more reduced effector functions demonstrate reduced binding to Fc receptors relative to an antibody having wild-type IgG1 heavy chain. Optionally, the reduced binding to the Fc receptor is 10- to 3200-fold weaker than the binding demonstrated by a wild-type IgG heavy chain. In some embodiments, the K_{D} for FcγR1A binding the Fc domain of the antibody with reduced effector function is between 0.1-100 nM, such as 0.3-92 nM. Optionally, the K_{D} for CD16aF binding the Fc domain of the antibody with one or more reduced effector functions is greater than 2 μM. In some embodiments, the K_{D} for CD16aV binding the Fc domain of the antibody with one or more reduced effector functions is greater than 0.4 μM. Optionally, the K_{D} for CD32aH binding the Fc domain of the antibody with one or more reduced effector functions is greater than 0.5 μM. In some embodiments, the K_{D} for CD32bF binding the Fc domain of the antibody with one or more reduced effector functions is greater than 1 μM.

[0127] In some embodiments, the isolated antibodies are fully human monoclonal antibodies. In some embodiments, the isolated antibodies are chimeric antibodies. In some embodiments, the isolated antibodies are humanized antibodies. In some embodiments, human anti-CD154 antibodies are produced by immunizing a non-human transgenic animal, e.g., a rodent, whose genome comprises human immunoglobulin genes so that the transgenic animal produces human antibodies.

[0128] In some embodiments, the anti-CD154 antibody comprises a human or humanized variable region, wherein the variable region comprises a heavy chain variable domain (VH) and a light chain variable domain (VL), and wherein the VH is operably linked to a human Fc domain with modified effector functions. In some embodiments, one or more effector functions of the human Fc domain are reduced. Optionally, one or more effector functions of the human Fc domain are eliminated. Optionally, the VH is operably linked to a human Fc region, wherein the human Fc region comprises a human hinge sequence and the human Fc domain, wherein the human hinge sequence is between the VH and the human Fc domain. In some embodiments, one or more effector functions of the human Fc region are reduced. Optionally, one or more effector functions of the human Fc region are eliminated. The hinge may comprise the amino acid sequence of any one of SEQ ID NOs: 76-90. In some embodiments, the hinge comprises the amino acid sequence of SEQ ID NO: 76. Optionally, the hinge comprises the amino acid sequence of SEQ ID NO: 77. The hinge may comprise the amino acid sequence of SEQ ID NO: 78. In some embodiments, the hinge comprises the amino acid sequence of SEQ ID NO: 79. Optionally, the hinge comprises the amino acid sequence of SEQ ID NO: 80. The hinge may comprise the amino acid sequence of SEQ ID NO: 81. In some embodiments, the hinge comprises the amino acid sequence of SEQ ID NO: 82. Optionally, the hinge comprises the amino acid sequence of SEQ ID NO: 83. The hinge may comprise the amino acid sequence of SEQ ID NO: 84. In some embodiments, the hinge comprises the amino acid sequence of SEQ ID NO: 85. Optionally, the hinge comprises the amino acid sequence of SEQ ID NO: 86. The hinge may comprise the amino acid sequence of SEQ ID NO: 87. In some embodiments, the hinge comprises the amino acid sequence of SEQ ID NO: 88. Optionally, the hinge comprises the amino acid sequence of SEQ ID NO: 89. The hinge may comprise the amino acid sequence of SEQ ID NO: 90.

[0129] In some embodiments, the human Fc domain is derived from an IgG1 Fc (or crystallizable fragment) region. Optionally, the human Fc domain is derived from an IgG1 constant region. The human Fc domain may be derived from an IgG2 Fc (or crystallizable fragment) region. In some embodiments, the Fc domain is derived from an IgG2 constant region. The human Fc domain may be derived from an IgG4 Fc (or crystallizable fragment) region. In some embodiments, the Fc domain is derived from an IgG4 constant region. In some embodiments, the human Fc region is derived from an IgG1 Fc (or crystallizable fragment) region. Optionally, the human Fc region is derived from an IgG1 constant region. In some embodiments, the human Fc region is derived from an IgG2 Fc (or crystallizable fragment) region. In some embodiments, the Fc region is derived from an IgG2 constant region. Optionally, the human Fc region is derived from an IgG4 Fc (or crystallizable fragment) region. The human Fc region may be derived from an IgG4 constant region.

[0130] In some embodiments, the Fc domain of the antibody disclosed herein comprises one or more amino acid modifications that modify effector functions, including reducing or eliminating one or more effector functions. In some embodiments, the Fc domain comprises an amino acid sequence that is at least 70%, 75%, 80%, 85%, 90%, 95%, 97%, 98% or 99% identical to the amino acid sequence of any one of SEQ ID NOs: 3-9, 12-18, and 238-241. Optionally, the Fc domain comprises an amino acid sequence that is at least 70%, 75%, 80%, 85%, 90%, 95%, 97%, 98% or 99% similar to the amino acid sequence of any one of SEQ ID NOs: 3-9, 12-18, and 238-241. The Fc domain may comprise an amino acid sequence selected from the group consisting of SEQ ID NOs 3-9, 12-18, and 238-241. In some embodiments, the Fc domain comprises an amino acid sequence that is at least 70%, 75%, 80%, 85%, 90%, 95%, 97%, 98% or 99% identical to the amino acid sequence of any one of SEQ ID NOs: 3-9, 12-18, and 236-241. Optionally, the Fc domain comprises an amino acid sequence that is at least 70%, 75%, 80%, 85%, 90%, 95%, 97%, 98% or 99% similar to the amino acid sequence of any one of SEQ ID NOs: 3-9, 12-18, and 236-241. In some embodiments, the Fc domain comprises the amino acid sequence of SEQ ID NO: 3. Optionally, the Fc domain comprises the amino acid sequence of SEQ ID NO: 4. In some embodiments, the Fc domain comprises the amino acid sequence of SEQ ID NO: 5. Optionally, the Fc domain comprises the amino acid sequence of SEQ ID NO: 6. In some embodiments, the Fc domain comprises the amino acid sequence of SEQ ID NO: 7. Optionally, the Fc domain comprises the amino acid sequence of SEQ ID NO: 8. In some embodiments, the Fc domain comprises the amino acid sequence of SEQ ID NO: 9. Optionally, the Fc domain comprises the amino acid sequence of SEQ ID NO: 12. In some embodiments, the Fc domain comprises the amino acid sequence of SEQ ID NO: 13. Optionally, the Fc domain comprises the amino acid sequence of SEQ ID NO: 14. In some embodiments, the Fc domain comprises the amino acid sequence of SEQ ID NO: 15. Optionally, the Fc domain comprises the amino acid sequence of SEQ ID NO: 16. In some embodiments, the Fc domain comprises the amino acid sequence of SEQ ID NO: 17. Optionally, the Fc domain comprises the amino acid sequence of SEQ ID NO: 18. In some embodiments, the Fc domain comprises the amino acid sequence of SEQ ID NO: 236. Optionally, the Fc domain comprises the amino acid sequence of SEQ ID NO: 237. In some embodiments, the Fc domain comprises the amino acid sequence of SEQ ID NO: 238. Optionally, the Fc domain comprises the amino acid sequence of SEQ ID NO: 239. In some embodiments, the Fc domain comprises the amino acid sequence of SEQ ID NO: 240. Optionally, the Fc domain comprises the amino acid sequence of SEQ ID NO: 241. In some embodiments, the Fc domain does not comprise the amino acid sequence of SEQ ID NO: 236. Optionally, the Fc domain does not comprise the amino acid sequence of SEQ ID NO: 237. In some embodiments, the Fc domain does not comprise the amino acid sequence of SEQ ID NOs: 236 and 237.

[0131] In some embodiments, the Fc region of the antibody of an antibody disclosed herein comprises one or more amino acid modifications that modify effector functions, including reducing or eliminating one or more effector functions. In some embodiments, the Fc region comprises an amino acid sequence that is at least 70%, 75%, 80%, 85%, 90%, 95%, 97%, 98% or 99% identical to the amino acid sequence of any one of SEQ ID NOs: 21-37, 40-56 and 243-251. Optionally, the Fc region comprises an amino acid sequence that is at least 70%, 75%, 80%, 85%, 90%, 95%, 97%, 98% or 99% similar to the amino acid sequence of any one of SEQ ID NOs: 21-37, 40-56 and 243-251. The Fc region may comprise an amino acid sequence selected from the group consisting of SEQ ID NOs 21-37, 40-56 and 243-251. In some embodiments, the Fc region comprises an amino acid sequence that is at least 70%, 75%, 80%, 85%, 90%, 95%, 97%, 98% or 99% identical to the amino acid sequence of any one of SEQ ID NOs: 21-37, 40-56 and 242-251. Optionally, the Fc region comprises an amino acid sequence that is at least 70%, 75%, 80%, 85%, 90%, 95%, 97%, 98% or 99% similar to the amino acid sequence of any one of SEQ ID NOs: 21-37, 40-56 and 242-251. The Fc region may comprise an amino acid sequence selected from the group consisting of SEQ ID NOs: 21-37, 40-56 and 242-251. In some embodiments, the Fc region comprises the amino acid sequence of SEQ ID NO: 21. Optionally, the Fc region comprises the amino acid sequence of SEQ ID NO: 22. In some embodiments, the Fc region comprises the amino acid sequence of SEQ ID NO: 23. Optionally, the Fc region comprises the amino acid sequence of SEQ ID NO: 24. In some embodiments, the Fc region comprises the amino acid sequence of SEQ ID NO: 25. Optionally, the Fc region comprises the amino acid sequence of SEQ ID NO: 26. In some embodiments, the Fc region comprises the amino acid sequence of SEQ ID NO: 27. Optionally, the Fc region comprises the amino acid sequence of SEQ ID NO: 28. In some embodiments, the Fc region comprises the amino acid sequence of SEQ ID NO: 29. Optionally, the Fc region comprises the amino acid sequence of SEQ ID NO: 30. In some embodiments, the Fc region comprises the amino acid sequence of SEQ ID NO: 31. Optionally, the Fc region comprises the amino acid sequence of SEQ ID NO: 32. In some embodiments, the Fc region comprises the amino acid sequence of SEQ ID NO: 33. Optionally, the Fc region comprises the amino acid sequence of SEQ ID NO: 34. In some embodiments, the Fc region comprises the amino acid sequence of SEQ ID NO: 35. Optionally, the Fc region comprises the amino acid sequence of SEQ ID NO: 36. In some embodiments, the Fc region comprises the amino acid sequence of SEQ ID NO: 37. In some embodiments, the Fc region comprises the amino acid sequence of SEQ ID NO: 40. Optionally, the Fc region comprises the amino acid sequence of SEQ ID NO: 41. In some embodiments, the Fc region comprises the amino acid sequence of SEQ ID NO: 42. Optionally, the Fc region comprises the amino acid sequence of SEQ ID NO: 43. In some embodiments, the Fc region comprises the amino acid sequence of SEQ ID NO: 44. Optionally, the Fc region comprises the amino acid sequence of SEQ ID NO: 45. In some embodiments, the Fc region comprises the amino acid sequence of SEQ ID NO: 46. Optionally, the Fc region comprises the amino acid sequence of SEQ ID NO: 47. In some embodiments, the Fc region comprises the amino acid sequence of SEQ ID NO: 48. Optionally, the Fc region comprises the amino acid sequence of SEQ ID NO: 49. In some embodiments, the Fc region comprises the amino acid sequence of SEQ ID NO: 50. Optionally, the Fc region comprises the amino acid sequence of SEQ ID NO: 51. In some embodiments, the Fc region comprises the amino acid sequence of SEQ ID NO: 52. Optionally, the Fc region comprises the amino acid sequence of SEQ ID NO: 53. In some embodiments, the Fc region comprises the amino acid sequence of SEQ ID NO: 54. Optionally, the Fc region comprises the amino acid sequence of SEQ ID NO: 55. In some embodiments, the Fc region comprises the amino acid sequence of SEQ ID NO: 56. In some embodiments, the Fc region comprises the amino acid sequence of SEQ ID NO: 242. Optionally, the Fc region comprises the amino acid sequence of SEQ ID NO: 243. In some embodiments, the Fc region comprises the amino acid sequence of SEQ ID NO: 244. Optionally, the Fc region comprises the amino acid sequence of SEQ ID NO: 245. In some embodiments, the Fc region comprises the amino acid sequence of SEQ ID NO: 246. Optionally, the Fc region comprises the amino acid sequence of SEQ ID NO: 247. In some embodiments, the Fc region comprises the amino acid sequence of SEQ ID NO: 248. Optionally, the Fc region comprises the amino acid sequence of SEQ ID NO: 249. In some embodiments, the Fc region comprises the amino acid sequence of SEQ ID NO: 250. Optionally, the Fc region comprises the amino acid sequence of SEQ ID NO: 251. In some embodiments, the Fc domain does not comprise the amino acid sequence of SEQ ID NO: 236. Optionally, the Fc domain does not comprise the amino acid sequence of SEQ ID NO: 237. In some embodiments, the Fc domain does not comprise the amino acid sequence of SEQ ID NO: 242. Optionally, the Fc domain does not comprise the amino acid sequence of SEQ ID NOs: 236, 237 and 242.

[0132] In some embodiments, the antibody comprising the IgG4-derived Fc domain or Fc region comprises an amino acid modification at any one of the positions selected from the group consisting of S228, L235, L236, G237, E318, and N297 or a combination thereof, wherein the numbering of amino acid residues is according to the EU index as set forth in Edelman G M et al., Proc. Natl. Acad. USA, 63, 78-85 (1969). In preferred embodiments, the antibody comprising the IgG4-derived Fc domain or Fc region comprises an amino acid modification selected from the group consisting of S228P, L235A, L235E, L236E, G237A, E318A, and N297Q or a combination thereof. See, e.g., FIG. 9c.

[0133] In some embodiments, the antibody comprising the IgG1-derived Fc domain or Fc region comprises an amino acid modification at any one of the positions selected from the group consisting E216, R217, K218, C219, C220, C226, C229, P230, E233, L234, L235, G236, G237, P238, S239, V240, F241, K246, L251, T260, D265, V266, H268, W277, N297, E318, K322, P329, A330, P331, Q347, N348, T350, L351, K360, T366, N390, K392, T394, D399, S400, F405, Y407, K409, T411 or a combination such amino acid modifications, wherein the numbering of amino acid residues is according to the EU index as set forth in Edelman G M et al., Proc. Natl. Acad. USA, 63, 78-85 (1969). In preferred embodiments, the antibody comprising the IgG1-derived Fc domain or Fc region comprises an amino acid modification selected from the group consisting of C220S, C226S, C229S, P230S, E233P, L234A, L234F, L234V, L235A, L235E, L235V, G236E, G237A, P238S, D265S, D265A, H268Q, W277T, N297G, N297Q, N297D, N297A, E318A, K322A, P329G, P329A, A330S, P331S, Q347R, Q347E, Q347K, T350V, L351Y, K360D, K360E, T366A, T366I, T366L, T366M, T366V, N390R, N390K, N390D, K392V, K392M, K392R, K392L, K392F, K392E, T394W, D399R, D399W, D399K, S400E, S400D, S400R, S400K, F405A, F405I, F405M, F405T, F405S, F405V, F405W, Y407A, Y407I, Y407L, Y407V, K409F, K409I, K409S, K409W, T411N, T411R, T411Q, T411K, T411D, T411E, T411W, ΔE216-E222, K246R/L251E/T260R, InR234/235, InV235/236, InR236/237, InR237/238, InV238/239, InN238/239, InL238/239, InE238/239, InG238/239, InS239/240, InG240/241, InE240/241, InG240/241, InL238/239/P238Q, InE238/239/N348A, InS239/240/V266A, and InR237/238/G236A or a combination thereof. See, e.g., FIG. 9a.

[0134] In some embodiments, the antibody comprising the IgG2-derived Fc domain or Fc region comprises an amino acid modification at any one of the positions selected from the group consisting of V234, G237, P238, H268, V309, A330, and P331 or a combination thereof, wherein the numbering of amino acid residues is according to the EU numbering as set forth in Edelman. In preferred embodiments, the antibody comprising the IgG2-derived Fc domain or Fc region comprises an amino acid modification selected from the group consisting of V234A, G237A, P238S, H268Q, H268A, V309L, A330S, P331S, or a combination thereof. See, e.g., FIG. 9b.

[0135] In some embodiments, the VH comprises (a) a heavy chain CDR1 having the amino acid sequence of SEQ ID NO: 57, (b) a heavy chain CDR2 having the amino acid sequence of SEQ ID NO: 58, and (c) a heavy chain CDR3 having the amino acid sequence of SEQ ID NO: 59; and the VL comprises (a) a light chain CDR1 having the amino acid sequence of SEQ ID NO: 60, (b) a light chain CDR2 having the amino acid sequence of SEQ ID NO: 61, and (c) a light chain CDR3 having the amino acid sequence of SEQ ID NO: 62.

[0136] In some embodiments, the VH comprises an amino acid sequence that is at least 70%, 75%, 80%, 85%, 90%, 95%, 97%, 98% or 99% identical to the amino acid sequence of SEQ ID NO: 63, 64, 252 or 253. Optionally, the VH comprise an amino acid sequence that is at least 70%, 75%, 80%, 85%, 90%, 95%, 97%, 98% or 99% similar to the amino acid sequence of SEQ ID NO: 63, 64, 252 or 253. The VH may comprise the amino acid sequence of SEQ ID NO: 63, 64, 252 or 253. In some embodiments, the VH comprises the amino acid sequence of SEQ ID NO: 63. Optionally, the VH comprises the amino acid sequence of SEQ ID NO: 64. In some embodiments, the VH comprises the amino acid sequence of SEQ ID NO: 252. Optionally, the VH comprises the amino acid sequence of SEQ ID NO: 253. In some-embodiments, the VH does not comprise the amino acid sequence of SEQ ID NO: 233.

[0137] In some embodiments, the VL comprises an amino acid sequence that is at least 70%, 75%, 80%, 85%, 90%, 95%, 97%, 98% or 99% identical to the amino acid sequence of SEQ ID NO: 65 or 66. Optionally, the VL comprise an amino acid sequence that is at least 70%, 75%, 80%, 85%, 90%, 95%, 97%, 98% or 99% similar to the amino acid sequence of SEQ ID NO: 65 or 66. The VL may comprise the amino acid sequence of SEQ ID NO: 65 or 66. In some embodiments, the VL comprises the amino acid sequence of SEQ ID NO: 65. Optionally, the VL comprises the amino acid sequence of SEQ ID NO: 66.

[0138] In some embodiments, the antibody further comprises a CH1 domain, wherein the CH1 domain is operably linked to (a) the C-terminal end of the VH, and (b) the N-terminal end of the hinge. Optionally, the CH1 domain comprises an amino acid sequence that is at least 80% 85%, 90%, 95%, 97%, 98% or 99% identical to the amino acid sequence of any one of SEQ ID NOs: 67, 70, and 73. The CH1 domain may comprise an amino acid sequence that is at least 80% 85%, 90%, 95%, 97%, 98% or 99% similar to the amino acid sequence of any one of SEQ ID NOs: 67, 70, and 73. In some embodiments, the CH1 domain comprises the amino acid sequence of any one of SEQ ID NO: 67, 70, and 73. The CH1 domain may comprise the amino acid sequence of SEQ ID NO: 67. Optionally, the CH1 domain comprises the amino acid sequence of SEQ ID NO: 70. In some embodiments, the CH1 domain comprises the amino acid sequence of SEQ ID NO: 73.

[0139] In some embodiments, the antibody comprises a linker between the VH and the Fc domain. Optionally, the linker comprises the amino acid sequence of any one of SEQ ID NOs: 199-223 and 327-330. In some embodiments, the linker comprises the amino acid sequence of any one of SEQ ID NOs: 199-223. The linker may comprise the amino acid sequence of any one of SEQ ID NOs: 327-330. In some embodiments, the linker comprises the amino acid sequence of SEQ ID NO: 199. Optionally, the linker comprises the amino acid sequence of SEQ ID NO: 200. In some embodiments, the linker comprises the amino acid sequence of SEQ ID NO: 201. Optionally, the linker comprises the amino acid sequence of SEQ ID NO: 202. In some embodiments, the linker comprises the amino acid sequence of SEQ ID NO: 203. Optionally, the linker comprises the amino acid sequence of SEQ ID NO: 204. In some embodiments, the linker comprises the amino acid sequence of SEQ ID NO: 205. Optionally, the linker comprises the amino acid sequence of SEQ ID NO: 206. In some embodiments, the linker comprises the amino acid sequence of SEQ ID NO: 207. Optionally, the linker comprises the amino acid sequence of SEQ ID NO: 208. In some embodiments, the linker comprises the amino acid sequence of SEQ ID NO: 209. Optionally, the linker comprises the amino acid sequence of SEQ ID NO: 210. In some embodiments, the linker comprises the amino acid sequence of SEQ ID NO: 211. Optionally, the linker comprises the amino acid sequence of SEQ ID NO: 212. In some embodiments, the linker comprises the amino acid sequence of SEQ ID NO: 213. Optionally, the linker comprises the amino acid sequence of SEQ ID NO: 214. In some embodiments, the linker comprises the amino acid sequence of SEQ ID NO: 215. Optionally, the linker comprises the amino acid sequence of SEQ ID NO: 216. In some embodiments, the linker comprises the amino acid sequence of SEQ ID NO: 217. Optionally, the linker comprises the amino acid sequence of SEQ ID NO: 218. In some embodiments, the linker comprises the amino acid sequence of SEQ ID NO: 219. Optionally, the linker comprises the amino acid sequence of SEQ ID NO: 220. In some embodiments, the linker comprises the amino acid sequence of SEQ ID NO: 221. Optionally, the linker comprises the amino acid sequence of SEQ ID NO: 222. In some embodiments, the linker comprises the amino acid sequence of SEQ ID NO: 223. Optionally, the linker comprises the amino acid sequence of SEQ ID NO: 327. In some embodiments, the linker comprises the amino acid sequence of SEQ ID NO: 328. Optionally, the linker comprises the amino acid sequence of SEQ ID NO: 329. In some embodiments, the linker comprises the amino acid sequence of SEQ ID NO: 330. The linker may be between the VH and the hinge. In some embodiments, the linker is between the VH and the CH1 domain.

[0140] In some embodiments, the VH is operably linked to an amino acid sequence that is at least 80% 85%, 90%, 95%, 97%, 98% or 99% identical to the amino acid sequence of any one of SEQ ID NOs: 3-9, 12-18, 21-37, 40-56, 238-241, and 243-251. Optionally, the VH is operably linked to an amino acid sequence that is at least 80% 85%, 90%, 95%, 97%, 98% or 99% similar to the amino acid sequence of any one of SEQ ID NOs: 3-9, 12-18, 21-37, 40-56, 238-241, and 243-251. The VH may be operably linked to the amino acid sequence of any one of SEQ ID NOs: 3-9, 12-18, 21-37, 40-56, 238-241, and 243-251. In some embodiments, the VH is operably linked to the amino acid sequence of SEQ ID NO: 3. Optionally, the VH is operably linked to the amino acid sequence of SEQ ID NO: 4. The VH may be operably linked to the amino acid sequence of SEQ ID NO: 5. In some embodiments, the VH is operably linked to the amino acid sequence of SEQ ID NO: 6. Optionally, the VH is operably linked to the amino acid sequence of SEQ ID NO: 7. The VH may be operably linked to the amino acid sequence of SEQ ID NO: 8. In some embodiments, the VH is operably linked to the amino acid sequence of SEQ ID NO: 9. Optionally, the VH is operably linked to the amino acid sequence of SEQ ID NO: 12. The VH may be operably linked to the amino acid sequence of SEQ ID NO: 13. In some embodiments, the VH is operably linked to the amino acid sequence of SEQ ID NO: 14. Optionally, the VH is operably linked to the amino acid sequence of SEQ ID NO: 15. The VH may be operably linked to the amino acid sequence of SEQ ID NO: 16. In some embodiments, the VH is operably linked to the amino acid sequence of SEQ ID NO: 17. Optionally, the VH is operably linked to the amino acid sequence of SEQ ID NO: 18. The VH may be operably linked to the amino acid sequence of SEQ ID NO: 21. In some embodiments, the VH is operably linked to the amino acid sequence of SEQ ID NO: 22. Optionally, the VH is operably linked to the amino acid sequence of SEQ ID NO: 23. The VH may be operably linked to the amino acid sequence of SEQ ID NO: 24. In some embodiments, the VH is operably linked to the amino acid sequence of SEQ ID NO: 25. Optionally, the VH is operably linked to the amino acid sequence of SEQ ID NO: 26. The VH may be operably linked to the amino acid sequence of SEQ ID NO: 27. In some embodiments, the VH is operably linked to the amino acid sequence of SEQ ID NO: 28. Optionally, the VH is operably linked to the amino acid sequence of SEQ ID NO: 29. The VH may be operably linked to the amino acid sequence of SEQ ID NO: 30. In some embodiments, the VH is operably linked to the amino acid sequence of SEQ ID NO: 31. Optionally, the VH is operably linked to the amino acid sequence of SEQ ID NO: 32. The VH may be operably linked to the amino acid sequence of SEQ ID NO: 33. In some embodiments, the VH is operably linked to the amino acid sequence of SEQ ID NO: 34. Optionally, the VH is operably linked to the amino acid sequence of SEQ ID NO: 35. The VH may be operably linked to the amino acid sequence of SEQ ID NO: 36. In some embodiments, the VH is operably linked to the amino acid sequence of SEQ ID NO: 37. Optionally, the VH is operably linked to the amino acid sequence of SEQ ID NO: 40. The VH may be operably linked to the amino acid sequence of SEQ ID NO: 41. In some embodiments, the VH is operably linked to the amino acid sequence of SEQ ID NO: 42. Optionally, the VH is operably linked to the amino acid sequence of SEQ ID NO: 43. The VH may be operably linked to the amino acid sequence of SEQ ID NO: 44. In some embodiments, the VH is operably linked to the amino acid sequence of SEQ ID NO: 45. Optionally, the VH is operably linked to the amino acid sequence of SEQ ID NO: 46. The VH may be operably linked to the amino acid sequence of SEQ ID NO: 47. In some embodiments, the VH is operably linked to the amino acid sequence of SEQ ID NO: 48. Optionally, the VH is operably linked to the amino acid sequence of SEQ ID NO: 49. The VH may be operably linked to the amino acid sequence of SEQ ID NO: 50. In some embodiments, the VH is operably linked to the amino acid sequence of SEQ ID NO: 51. Optionally, the VH is operably linked to the amino acid sequence of SEQ ID NO: 52. The VH may be operably linked to the amino acid sequence of SEQ ID NO: 53. In some embodiments, the VH is operably linked to the amino acid sequence of SEQ ID NO: 54. Optionally, the VH is operably linked to the amino acid sequence of SEQ ID NO: 55. The VH may be operably linked to the amino acid sequence of SEQ ID NO: 56. Optionally, the VH is operably linked to the amino acid sequence of SEQ ID NO: 236. The VH may be operably linked to the amino acid sequence of SEQ ID NO: 237. Optionally, the VH is operably linked to the amino acid sequence of SEQ ID NO: 238. The VH may be operably linked to the amino acid sequence of SEQ ID NO: 239. In some embodiments, the VH is operably linked to the amino acid sequence of SEQ ID NO: 240. Optionally, the VH is operably linked to the amino acid sequence of SEQ ID NO: 241. In some embodiments, the VH is operably linked to the amino acid sequence of SEQ ID NO: 242. The VH may be operably linked to the amino acid sequence of SEQ ID NO: 243. Optionally, the VH is operably linked to the amino acid sequence of SEQ ID NO: 244. The VH may be operably linked to the amino acid sequence of SEQ ID NO: 245. Optionally, the VH is operably linked to the amino acid sequence of SEQ ID NO: 246. The VH may be operably linked to the amino acid sequence of SEQ ID NO: 247. Optionally, the VH is operably linked to the amino acid sequence of SEQ ID NO: 248. The VH may be operably linked to the amino acid sequence of SEQ ID NO: 249. Optionally, the VH is operably linked to the amino acid sequence of SEQ ID NO: 250. The VH may be operably linked to the amino acid sequence of SEQ ID NO: 251. Optionally, the VH is not operably linked to the amino acid sequence of SEQ ID NO: 236. In some embodiments, the VH is not be operably linked to the amino acid sequence of SEQ ID NO: 237. Optionally, the VH is not be operably linked to the amino acid sequence of SEQ ID NO: 242. In some embodiments, the VH is not be operably linked to the amino acid sequence of SEQ ID NOs: 236 and 237. Optionally, the VH is not be operably linked to the amino acid sequence of SEQ ID NOs: 236, 237 and 242.

[0141] In some embodiments, the heavy chain comprises an amino acid sequence that is at least 70%, 75%, 80%, 85%, 90%, 95%, 97%, 98% or 99% identical to the amino acid sequence of any one of SEQ ID NOs: 121-132, 135-146, 149-160, 163-174 and 266-288. Optionally, the heavy chain comprises an amino acid sequence that is at least 70%, 75%, 80%, 85%, 90%, 95%, 97%, 98% or 99% similar to the amino acid sequence of any one of SEQ ID NOs: 121-132, 135-146, 149-160, 163-174 and 266-288. The heavy chain may comprise the amino acid sequence of any one of SEQ ID NOs: 121-132, 135-146, 149-160, 163-174 and 266-288. In some embodiments, the heavy chain comprises an amino acid sequence that is at least 70%, 75%, 80%, 85%, 90%, 95%, 97%, 98% or 99% identical to the amino acid sequence of any one of SEQ ID NOs: 121-132, 135-146, 149-160, 163-174, 266-277, and 279-288. Optionally, the heavy chain comprises an amino acid sequence that is at least 70%, 75%, 80%, 85%, 90%, 95%, 97%, 98% or 99% similar to the amino acid sequence of any one of SEQ ID NOs: 121-132, 135-146, 149-160, 163-174, 266-277, and 279-288. The heavy chain may comprise the amino acid sequence of any one of SEQ ID NOs: 121-132, 135-146, 149-160, 163-174, 266-277, and 279-288. In some embodiments, the heavy chain comprises an amino acid sequence that is at least 70%, 75%, 80%, 85%, 90%, 95%, 97%, 98% or 99% identical to the amino acid sequence of any one of SEQ ID NOs: 121-132, 135-146, 149, 151-160, 163, 165-174 and 266-288. Optionally, the heavy chain comprises an amino acid sequence that is at least 70%, 75%, 80%, 85%, 90%, 95%, 97%, 98% or 99% similar to the amino acid sequence of any one of SEQ ID NOs: 121-132, 135-146, 149, 151-160, 163, 165-174 and 266-288. The heavy chain may comprise the amino acid sequence of any one of SEQ ID NOs: 121-132, 135-146, 149, 151-160, 163, 165-174 and 266-288. In some embodiments, the heavy chain comprises an amino acid sequence that is at least 70%, 75%, 80%, 85%, 90%, 95%, 97%, 98% or 99% identical to the amino acid sequence of any one of SEQ ID NOs: 121-132, 135-146, 149, 151-160, 163, 165-174, 266-277, and 279-288. Optionally, the heavy chain comprises an amino acid sequence that is at least 70%, 75%, 80%, 85%, 90%, 95%, 97%, 98% or 99% similar to the amino acid sequence of any one of SEQ ID NOs: 121-132, 135-146, 149, 151-160, 163, 165-174, 266-277, and 279-288. The heavy chain may comprise the amino acid sequence of any one of SEQ ID NOs: 121-132, 135-146, 149, 151-160, 163, 165-174, 266-277, and 279-288. In some embodiments, the heavy chain comprises an amino acid sequence that is at least 70%, 75%, 80%, 85%, 90%, 95%, 97%, 98% or 99% identical to the amino acid sequence of any one of SEQ ID NOs: 121-132, 135-146, 149, 151-160, 163, 165-174, 267-271, 273-277, and 279-288. Optionally, the heavy chain comprises an amino acid sequence that is at least 70%, 75%, 80%, 85%, 90%, 95%, 97%, 98% or 99% similar to the amino acid sequence of any one of SEQ ID NOs: 121-132, 135-146, 149, 151-160, 163, 165-174, 267-271, 273-277, and 279-288. The heavy chain may comprise the amino acid sequence of any one of SEQ ID NOs: 121-132, 135-146, 149, 151-160, 163, 165-174, 267-271, 273-277, and 279-288. In some embodiments, the heavy chain comprises the amino acid sequence of SEQ ID NO: 121. Optionally, the heavy chain comprises the amino acid sequence of SEQ ID NO: 122. The heavy chain may comprise the amino acid sequence of SEQ ID NO: 123. In some embodiments, the heavy chain comprises the amino acid sequence of SEQ ID NO: 124. Optionally, the heavy chain comprises the amino acid sequence of SEQ ID NO: 125. The heavy chain may comprise the amino acid sequence of SEQ ID NO: 126. In some embodiments, the heavy chain comprises the amino acid sequence of SEQ ID NO: 127. Optionally, the heavy chain comprises the amino acid sequence of SEQ ID NO: 128. The heavy chain may comprise the amino acid sequence of SEQ ID NO: 129. In some embodiments, the heavy chain comprises the amino acid sequence of SEQ ID NO: 130. Optionally, the heavy chain comprises the amino acid sequence of SEQ ID NO: 131. The heavy chain may comprise the amino acid sequence of SEQ ID NO: 132. In some embodiments, the heavy chain comprises the amino acid sequence of SEQ ID NO: 135. Optionally, the heavy chain comprises the amino acid sequence of SEQ ID NO: 136. The heavy chain may comprise the amino acid sequence of SEQ ID NO: 137. In some embodiments, the heavy chain comprises the amino acid sequence of SEQ ID NO: 138. Optionally, the heavy chain comprises the amino acid sequence of SEQ ID NO: 139. The heavy chain may comprise the amino acid sequence of SEQ ID NO: 140. In some embodiments, the heavy chain comprises the amino acid sequence of SEQ ID NO: 141. Optionally, the heavy chain comprises the amino acid sequence of SEQ ID NO: 142. The heavy chain may comprise the amino acid sequence of SEQ ID NO: 143. In some embodiments, the heavy chain comprises the amino acid sequence of SEQ ID NO: 144. Optionally, the heavy chain comprises the amino acid sequence of SEQ ID NO: 145. The heavy chain may comprise the amino acid sequence of SEQ ID NO: 146. In some embodiments, the heavy chain comprises the amino acid sequence of SEQ ID NO: 149. Optionally, the heavy chain comprises the amino acid sequence of SEQ ID NO: 150. The heavy chain may comprise the amino acid sequence of SEQ ID NO: 151. In some embodiments, the heavy chain comprises the amino acid sequence of SEQ ID NO: 152. Optionally, the heavy chain comprises the amino acid sequence of SEQ ID NO: 153. The heavy chain may comprise the amino acid sequence of SEQ ID NO: 154. In some embodiments, the heavy chain comprises the amino acid sequence of SEQ ID NO: 155. Optionally, the heavy chain comprises the amino acid sequence of SEQ ID NO: 156. The heavy chain may comprise the amino acid sequence of SEQ ID NO: 157. In some embodiments, the heavy chain comprises the amino acid sequence of SEQ ID NO: 158. Optionally, the heavy chain comprises the amino acid sequence of SEQ ID NO: 159. The heavy chain may comprise the amino acid sequence of SEQ ID NO: 160. In some embodiments, the heavy chain comprises the amino acid sequence of SEQ ID NO: 163. Optionally, the heavy chain comprises the amino acid sequence of SEQ ID NO: 164. The heavy chain may comprise the amino acid sequence of SEQ ID NO: 165. In some embodiments, the heavy chain comprises the amino acid sequence of SEQ ID NO: 166. Optionally, the heavy chain comprises the amino acid sequence of SEQ ID NO: 167. The heavy chain may comprise the amino acid sequence of SEQ ID NO: 168. In some embodiments, the heavy chain comprises the amino acid sequence of SEQ ID NO: 169. Optionally, the heavy chain comprises the amino acid sequence of SEQ ID NO: 170. The heavy chain may comprise the amino acid sequence of SEQ ID NO: 171. In some embodiments, the heavy chain comprises the amino acid sequence of SEQ ID NO: 172. Optionally, the heavy chain comprises the amino acid sequence of SEQ ID NO: 173. The heavy chain may comprise the amino acid sequence of SEQ ID NO: 174. In some embodiments, the heavy chain comprises the amino acid sequence of SEQ ID NO: 266. Optionally, the heavy chain comprises the amino acid sequence of SEQ ID NO: 267. The heavy chain may comprise the amino acid sequence of SEQ ID NO: 268. In some embodiments, the heavy chain comprises the amino acid sequence of SEQ ID NO: 269. Optionally, the heavy chain comprises the amino acid sequence of SEQ ID NO: 270. The heavy chain may comprise the amino acid sequence of SEQ ID NO: 271. The heavy chain may comprise the amino acid sequence of SEQ ID NO: 272. In some embodiments, the heavy chain comprises the amino acid sequence of SEQ ID NO: 273. Optionally, the heavy chain comprises the amino acid sequence of SEQ ID NO: 274. The heavy chain may comprise the amino acid sequence of SEQ ID NO: 275. Optionally, the heavy chain comprises the amino acid sequence of SEQ ID NO: 276. The heavy chain may comprise the amino acid sequence of SEQ ID NO: 277. In some embodiments, the heavy chain comprises the amino acid sequence of SEQ ID NO: 278. In some embodiments, the heavy chain comprises the amino acid sequence of SEQ ID NO: 279. Optionally, the heavy chain comprises the amino acid sequence of SEQ ID NO: 280. The heavy chain may comprise the amino acid sequence of SEQ ID NO: 281. In some embodiments, the heavy chain comprises the amino acid sequence of SEQ ID NO: 282. Optionally, the heavy chain comprises the amino acid sequence of SEQ ID NO: 283. The heavy chain may comprise the amino acid sequence of SEQ ID NO: 284. In some embodiments, the heavy chain comprises the amino acid sequence of SEQ ID NO: 285. Optionally, the heavy chain comprises the amino acid sequence of SEQ ID NO: 286. The heavy chain may comprise the amino acid sequence of SEQ ID NO: 287. In some embodiments, the heavy chain comprises the amino acid sequence of SEQ ID NO: 288. Optionally, the heavy chain does not comprise the amino acid sequence of SEQ ID NO: 150. In some embodiments, the heavy chain does not comprise the amino acid sequence of SEQ ID NO: 164. Optionally, the heavy chain does not comprise the amino acid sequence of SEQ ID NOs: 150 and 164. In some embodiments, the heavy chain does not comprise the amino acid sequence of SEQ ID NO: 234. Optionally, the heavy chain does not comprise the amino acid sequence of SEQ ID NO: 266. In some embodiments, the heavy chain does not comprise the amino acid sequence of SEQ ID NO: 272. In some embodiments, the heavy chain does not comprise the amino acid sequence of SEQ ID NO: 278. Optionally, the heavy chain does not comprise the amino acid sequence of SEQ ID NOs: 234 and 278. In some embodiments, the heavy chain does not comprise the amino acid sequence of SEQ ID NOs: 234, 266, 272 and 278. Optionally, the heavy chain does not comprise the amino acid sequence of SEQ ID NOs: 150, 164, 234 and 278. In some embodiments, the heavy chain does not comprise the amino acid sequence of SEQ ID NOs: 150, 164, 234, 266, 272 and 278.

[0142] In some embodiments, the light chain comprises an amino acid sequence that is at least 70%, 75%, 80%, 85%, 90%, 95%, 97%, 98% or 99% identical to the amino acid sequence of any one of SEQ ID NOs: 195 and 196. Optionally, the light chain comprises an amino acid sequence that is at least 70%, 75%, 80%, 85%, 90%, 95%, 97%, 98% or 99% similar to the amino acid sequence of any one of SEQ ID NOs: 195 and 196. The light chain may comprise the amino acid sequence of SEQ ID NO: 195 or 196. In some embodiments, the light chain comprises the amino acid sequence of SEQ ID NO: 195. Optionally, the light chain comprises the amino acid sequence of SEQ ID NO: 196.

[0143] In some embodiments, the antibody is monoclonal. Optionally, the antibody is a chimeric antibody. The antibody may be a humanized antibody. In some embodiments, the antibody is a human antibody.

[0144] In some embodiments, the binding of the antibody to human CD154 inhibits the interaction between human CD154 and human CD40. Optionally, the antibody blocks the activation of one or more of B cells, macrophages, dendritic cells, or endothelial cells by inhibiting binding of CD154 to CD40. In some embodiments, a reduced level of thrombosis is observed after administration of the antibody compared to level of thrombosis after administration of the 5c8 or hu5c8 antibody. Optionally, the antibody does not cause thrombosis when administered to a subject.

[0145] In some embodiments, the antibody has one or more of the following effects when administered to a subject: (a) decreased risk of thrombosis or thromboembolic events compared to hu5c8 antibody; (b) decreased activation of platelets expressing CD154; (c) inhibition of CD154 shedding; and (d) alteration of the expression or activity of downstream targets of CD154-CD40 signaling. Optionally, the administration of the antibody results in a decreased risk for thrombosis or thromboembolic events, compared to a subject where a 5c8 or hu5c8 antibody has been administered. In some embodiments, the administration of the antibody results in a decreased activation of platelets expressing CD154. Optionally, the administration of the antibody results in the inhibition of CD154 shedding. In some embodiments, the administration of the antibody results in the alteration the expression of activity of downstream targets of CD154-CD40 signaling.

[0146] In some embodiments, the human Fc domain with modified effector functions does not comprise the amino acid sequence consisting of any one of SEQ ID NOs: 1, 2, 10, 11, 231, and 236. Optionally, the human Fc domain with modified effector functions does not comprise the amino acid sequence consisting of SEQ ID NO: 1. In some embodiments, the human Fc domain with modified effector functions does not comprise the amino acid sequence consisting of SEQ ID NO: 2. Optionally, the human Fc domain with modified effector functions does not comprise the amino acid sequence consisting of SEQ ID NO: 10. In some embodiments, the human Fc domain with modified effector functions does not comprise the amino acid sequence consisting of SEQ ID NO: 11. Optionally, the human Fc domain with modified effector functions does not comprise the amino acid sequence consisting of SEQ ID NO: 231. In some embodiments, the human Fc domain with modified effector functions does not comprise the amino acid sequence consisting of SEQ ID NO: 236. In some embodiments, the antibody does not comprise the amino acid sequence consisting of any one of SEQ ID NOs: 1, 2, 10, 11, 231, and 236. Optionally, the antibody does not comprise the amino acid sequence consisting of SEQ ID NO: 1. In some embodiments, the antibody does not comprise the amino acid sequence consisting of SEQ ID NO: 2. Optionally, the antibody does not comprise the amino acid sequence consisting of SEQ ID NO: 10. In some embodiments, the antibody does not comprise the amino acid sequence consisting of SEQ ID NO: 11. Optionally, the antibody does not comprise the amino acid sequence consisting of SEQ ID NO: 231. In some embodiments, the antibody does not comprise the amino acid sequence consisting of SEQ ID NO: 236.

[0147] Optionally, the human Fc region with modified effector functions does not comprise the amino acid sequence consisting of any one of SEQ ID NOs: 19, 20, 38, 39, 232, and 235. In some embodiments, the human Fc region with modified effector functions does not comprise the amino acid sequence consisting of SEQ ID NO: 19. Optionally, the human Fc region with modified effector functions does not comprise the amino acid sequence consisting of SEQ ID NO: 20. In some embodiments, the human Fc region with modified effector functions does not comprise the amino acid sequence consisting of SEQ ID NO: 20. Optionally, the human Fc region with modified effector functions does not comprise the amino acid sequence consisting of SEQ ID NO: 38. In some embodiments, the human Fc region with modified effector functions does not comprise the amino acid sequence consisting of SEQ ID NO: 39. Optionally, the human Fc region with modified effector functions does not comprise the amino acid sequence consisting of SEQ ID NO: 232. In some embodiments, the human Fc region with modified effector functions does not comprise the amino acid sequence consisting of SEQ ID NO: 235. Optionally, the antibody does not comprise the amino acid sequence consisting of any one of SEQ ID NOs: 19, 20, 38, 39, 232, and 235. In some embodiments, the antibody does not comprise the amino acid sequence consisting of SEQ ID NO: 19. Optionally, the antibody does not comprise the amino acid sequence consisting of SEQ ID NO: 20. In some embodiments, the antibody does not comprise the amino acid sequence consisting of SEQ ID NO: 20. Optionally, the antibody does not comprise the amino acid sequence consisting of SEQ ID NO: 38. In some embodiments, antibody does not comprise the amino acid sequence consisting of SEQ ID NO: 39. Optionally, the antibody does not comprise the amino acid sequence consisting of SEQ ID NO: 232. In some embodiments, the antibody does not comprise the amino acid sequence consisting of SEQ ID NO: 235.

[0148] In some embodiments, the heavy chain with modified effector functions does not comprise the amino acid sequence consisting of any one of SEQ ID NOs: 119, 120, 133, 134, 147, 148, 150, 161, 162, 164, 230, 234, and 278. Optionally, the heavy chain with modified effector functions does not comprise the amino acid sequence consisting of SEQ ID NO: 119. In some embodiments, the heavy chain with modified effector functions does not comprise the amino acid sequence consisting of SEQ ID NO: 120. Optionally, the heavy chain with modified effector functions does not comprise the amino acid sequence consisting of SEQ ID NO: 133. In some embodiments, the heavy chain with modified effector functions does not comprise the amino acid sequence consisting of SEQ ID NO: 134. Optionally, the heavy chain with modified effector functions does not comprise the amino acid sequence consisting of SEQ ID NO: 147. In some embodiments, the heavy chain with modified effector functions does not comprise the amino acid sequence consisting of SEQ ID NO: 148. In some embodiments, the heavy chain with modified effector functions does not comprise the amino acid sequence consisting of SEQ ID NO: 150. Optionally, the heavy chain with modified effector functions does not comprise the amino acid sequence consisting of SEQ ID NO: 161. In some embodiments, the heavy chain with modified effector functions does not comprise the amino acid sequence consisting of SEQ ID NO: 162. In some embodiments, the heavy chain with modified effector functions does not comprise the amino acid sequence consisting of SEQ ID NO: 164. Optionally, the heavy chain with modified effector functions does not comprise the amino acid sequence consisting of SEQ ID NO: 230. In some embodiments, the heavy chain with modified effector functions does not comprise the amino acid sequence consisting of SEQ ID NO: 234. Optionally, the heavy chain with modified effector functions does not comprise the amino acid sequence consisting of SEQ ID NO: 278. In some embodiments, the antibody does not comprise the amino acid sequence consisting of any one of SEQ ID NOs: 119, 120, 133, 134, 147, 148, 150, 161, 162, 164, 230, 234, and 278. Optionally, the antibody does not comprise the amino acid sequence consisting of SEQ ID NO: 119. In some embodiments, the antibody does not comprise the amino acid sequence consisting of SEQ ID NO: 120. Optionally, the antibody does not comprise the amino acid sequence consisting of SEQ ID NO: 133. In some embodiments, the antibody does not comprise the amino acid sequence consisting of SEQ ID NO: 134. Optionally, the antibody does not comprise the amino acid sequence consisting of SEQ ID NO: 147. In some embodiments, the antibody does not comprise the amino acid sequence consisting of SEQ ID NO: 148. Optionally, the antibody does not comprise the amino acid sequence consisting of SEQ ID NO: 161. In some embodiments, the antibody does not comprise the amino acid sequence consisting of SEQ ID NO: 162. In some embodiments, the heavy chain with modified effector functions does not comprise the amino acid sequence consisting of SEQ ID NO: 164. Optionally, the antibody does not comprise the amino acid sequence consisting of SEQ ID NO: 230. In some embodiments, the antibody does not comprise the amino acid sequence consisting of SEQ ID NO: 234. Optionally, the heavy chain with modified effector functions does not comprise the amino acid sequence consisting of SEQ ID NO: 278. In some embodiments, the antibody does not comprise the amino acid sequence consisting of any one of SEQ ID NOs: 1, 2, 10, 11, 19, 20, 38, 39, 119, 120, 133, 134, 147, 148, 150, 161, 162, 164, 230, 231, 232, 234, 235, 236, and 278.

### Properties of the Anti-CD154 Antibodies

### Binding Affinity of Anti-CD154 Antibodies to CD154

[0149] The binding affinity (K_{D}) and dissociation rate (k_{off}) of an anti-CD154 antibody to CD154 can be determined by methods known in the art. The binding affinity can be measured by ELISA, RIA, flow cytometry, or surface plasmon resonance (SPR), such as with the BIACORE® system. The dissociation rate can be measured by SPR. Optionally, the binding affinity and dissociation rate are measured by SPR. In some embodiments, the binding affinity and dissociation rate are measured using BIACORE®. The skilled artisan can determine whether an antibody disclosed herein has substantially the same K_{D} as another anti-CD154 antibody by using methods known in the art. Such methods of determining K_{D} and k_{off} can be used during the initial screening stage, as well as during subsequent optimization stages. In some embodiments, the antibody has a K_{D} for CD154 of less than 50 pM. Optionally, the antibody has a K_{D} for CD154 of less than 25 pM. In some embodiments, the antibody has a K_{D} for CD154 of 5-25 pM. Optionally, the antibody has a K_{D} for CD154 of 9.5-23 pM.

### Inhibition of CD154 Activity by Anti-CD154 Antibody

[0150] Anti-CD154 antibodies that inhibit CD154 binding to CD40 can be identified using any one of a number of assays, e.g. competitive binding assays, FACS analysis, B cell activation assays, B cell proliferation assays, T cell activation assays, T cell proliferation assays. See, e.g., Barr et al., Immunology, 102(1):39-43 (2001); and Blair et al., J. Exp. Med., 191(4):651-660 (2001). For example, neutralizing anti-CD154 antibodies can be identified by their inhibition of up-regulation of a specific downstream target gene of CD154, such as CD23, CD44H, CD54, TRAF-3 and NFκB. In some embodiments, the anti-CD154 antibodies have an IC₅₀ of no greater than 500 nM, 300 nM, 200 nM, 150 nM, 100 nM, 50 nM, 20 nM, 10 nM, or 1 nM.

### Effector Function—Platelet Assays

[0151] The effector function of the anti-CD154 can be identified using any one of a number of assays, e.g. in vitro platelet activation and/or aggregation assays. See, e.g., U.S. Pat. No. 9,765,150; Langer F et al., Thromb Haemost. June; 93(6):1137-46 (2005); McKenzie, S. E. et al., J Immunol 162 (7) 4311-4318 (1999); and Scholthauer T et al, Protein Engineering, Design and Selection, 29(10): 457-466, (2016). Blood from human donors or mice expressing FcγRIIA (CD32a) on platelets may be used to assay platelet function. Platelet activation may be detected by flow cytometry using antibodies against platelet activation markers P-selectin (CD62P) and PAC-1 (activated GPIIb/IIIa). Platelet aggregation analysis may be analyzed using a minicell impedance device and quantifying the area-under-the-curve as a measure of the platelet aggregation impedance curve.

### Nucleic Acids, Vectors, Host Cells, and Recombinant Methods of Making Antibodies

### Nucleic Acids

[0152] A second aspect of the present disclosure provides nucleic acid molecules encoding the anti-CD154 antibodies disclosed herein. In some embodiments, separate nucleic acid molecules encode a heavy chain and a light chain of an anti-CD154 immunoglobulin. In other embodiments, the same nucleic acid molecule encodes both a heavy chain and a light chain of an anti-CD154 immunoglobulin.

[0153] In some embodiments, the nucleic acid molecule comprises a sequence encoding the VL of an anti-CD154 antibody disclosed herein.

[0154] In some embodiments, the nucleic acid molecule comprises a nucleotide sequence that encodes a VL comprising the amino acid sequence of any one of SEQ ID NOs: 65 and 66. In some embodiments, the nucleic acid molecule comprises the nucleotide sequence that encodes a VL comprising the amino acid sequence of any one of SEQ ID NOS: 65 and 66 or a portion thereof. In some embodiments, the nucleic acid encodes the amino acid sequence of one, two or all three light chain CDRs of said antibody. In some embodiments, said portion encodes a contiguous region from CDR1-CDR3 of the light chain of an anti-CD154 antibody.

[0155] In some embodiments, the nucleic acid molecule encodes a VL comprising an amino acid sequence that is at least 70%, 75%, 80%, 85%, 90%, 95%, 97%, 98% or 99% identical to the VL amino acid sequence of SEQ ID NO: 65 or 66. Optionally, the nucleic acid molecule encodes a VL comprising an amino acid sequence that is at least 70%, 75%, 80%, 85%, 90%, 95%, 97%, 98% or 99% similar to the VL amino acid sequence of SEQ ID NO: 65 or 66. Nucleic acid molecules may include nucleotide sequences that hybridize under highly stringent conditions to the complement of a nucleic acid encoding the amino acid sequence the VL region of SEQ ID NO: 65 or 66.

[0156] In some embodiments, the nucleic acid molecule comprises a sequence encoding the VH of an anti-CD154 antibody disclosed herein.

[0157] In some embodiments, the nucleic acid molecule comprises a nucleotide sequence that encodes a VH comprising the amino acid sequence of any one of SEQ ID NOs: 63, 64, 252 and 253. In some embodiments, the nucleic acid molecule comprises the nucleotide sequence that encodes a VH comprising the amino acid sequence of any one of SEQ ID NOS: 63, 64, 252 and 253 or a portion thereof. In some embodiments, the nucleic acid encodes the amino acid sequence of one, two or all three heavy chain CDRs of said antibody. In some embodiments, said portion encodes a contiguous region from CDR1-CDR3 of the heavy chain of an anti-CD154 antibody.

[0158] In some embodiments, the nucleic acid molecule encodes a VH comprising an amino acid sequence that is at least 70%, 75%, 80%, 85%, 90%, 95%, 97%, 98% or 99% identical to the VH amino acid sequence of SEQ ID NO: 63, 64, 252 or 253. Optionally, the nucleic acid molecule encodes a VH comprising an amino acid sequence that is at least 70%, 75%, 80%, 85%, 90%, 95%, 97%, 98% or 99% similar to the VH amino acid sequence of SEQ ID NO: 63, 64, 252 or 253. Nucleic acid molecules may include nucleotide sequences that hybridize under highly stringent conditions to the complement of a nucleic acid encoding the amino acid sequence the VH region of SEQ ID NOs: 63, 64, 252 or 253.

[0159] In some embodiments, the nucleic acid molecule comprises a sequence encoding the Fc domain of an anti-CD154 antibody disclosed herein.

[0160] In some embodiments, the nucleic acid molecule comprises a nucleotide sequence that encodes an Fc domain comprising the amino acid sequence of one of SEQ ID NOs: 3-9, 12-18 and 236-241. In some embodiments, the nucleic acid molecule comprises the nucleotide sequence that encodes an Fc domain comprising the amino acid sequence of any one of SEQ ID NOS: 3-9, 12-18 and 236-241 or a portion thereof.

[0161] In some embodiments, the nucleic acid molecule encodes an Fc domain comprising an amino acid sequence that is at least 70%, 75%, 80%, 85%, 90%, 95%, 97%, 98% or 99% identical to any one of the amino acid sequences of any one of SEQ ID NO: 3-9, 12-18 and 238-241. Optionally, the nucleic acid molecule encodes an Fc domain comprising an amino acid sequence that is at least 70%, 75%, 80%, 85%, 90%, 95%, 97%, 98% or 99% similar to any one of the amino acid sequences of any one of SEQ ID NO: 3-9, 12-18 and 238-241. Nucleic acid molecules may include nucleotide sequences that hybridize under highly stringent conditions to the complement of a nucleic acid encoding any one of the amino acid sequences of any one of SEQ ID NOs: 3-9, 12-18 and 238-241 or to the complement of a nucleic acid comprising the Fc region portion of the heavy chain nucleotide sequence of any one of SEQ ID NO: 177-179, 192-194, 289, 291-297, and 316, 318-324. In some embodiments, the nucleic acid molecule encodes an Fc domain comprising an amino acid sequence that is at least 70%, 75%, 80%, 85%, 90%, 95%, 97%, 98% or 99% identical to any one of the amino acid sequences of any one of SEQ ID NO: 3-9, 12-18 and 236-241. Optionally, the nucleic acid molecule encodes an Fc domain comprising an amino acid sequence that is at least 70%, 75%, 80%, 85%, 90%, 95%, 97%, 98% or 99% similar to any one of the amino acid sequences of any one of SEQ ID NO: 3-9, 12-18 and 236-241. Nucleic acid molecules may include nucleotide sequences that hybridize under highly stringent conditions to the complement of a nucleic acid encoding any one of the amino acid sequences of any one of SEQ ID NOs: 3-9, 12-18 and 236-241 or to the complement of a nucleic acid comprising the Fc region portion of the heavy chain nucleotide sequence of any one of SEQ ID NO: 177-179, 192-194, 289-297, and 316-324. In some embodiments, the nucleic acid molecule encoding an Fc domain comprises the nucleotide sequence that is at least 70%, 75%, 80%, 85%, 90%, 95%, 97%, 98% or 99% identical to the Fc region portion of any one of SEQ ID NO: 177-179, 192-194, 289-297, and 316-324. Optionally, the nucleic acid molecule encoding an Fc domain comprises the nucleotide sequence that is at least 70%, 75%, 80%, 85%, 90%, 95%, 97%, 98% or 99% similar to the Fc region portion of any one of SEQ ID NO: 177-179, 192-194, 289-297, and 316-324. In some embodiments, the nucleic acid molecule encoding an Fc domain comprises the nucleotide sequence of the Fc region portion of any one of SEQ ID NO: 177-179, 192-194, 289-297, and 316-324.

[0162] In some embodiments, the nucleic acid molecule comprises a sequence encoding the Fc region of an anti-CD154 antibody disclosed herein.

[0163] In some embodiments, the nucleic acid molecule comprises a nucleotide sequence that encodes an Fc region comprising the amino acid sequence of any one of SEQ ID NOs: 3-9, 12-18, 21-37, 40-56, 238-241 and 243-251. In some embodiments, the nucleic acid molecule comprises the nucleotide sequence that encodes an Fc region comprising the amino acid sequence of any one of SEQ ID NOS: 3-9, 12-18, 21-37, 40-56, 238-241 and 243-251 or a portion thereof. In some embodiments, the nucleic acid molecule comprises a nucleotide sequence that encodes an Fc region comprising the amino acid sequence of any one of SEQ ID NOs: 3-9, 12-18, 21-37, 40-56 and 236-251. In some embodiments, the nucleic acid molecule comprises the nucleotide sequence that encodes an Fc region comprising the amino acid sequence of any one of SEQ ID NOS: 3-9, 12-18, 21-37, 40-56 and 236-251 or a portion thereof. In some embodiments, the nucleic acid molecule comprises a nucleotide sequence that encodes an Fc region comprising the amino acid sequence of any one of SEQ ID NOs: 21-37, 40-56, and 243-251. In some embodiments, the nucleic acid molecule comprises the nucleotide sequence that encodes an Fc region comprising the amino acid sequence of any one of SEQ ID NOS: 21-37, 40-56, and 243-251 or a portion thereof. In some embodiments, the nucleic acid molecule comprises a nucleotide sequence that encodes an Fc region comprising the amino acid sequence of any one of SEQ ID NOs: 21-37, 40-56 and 242-251. In some embodiments, the nucleic acid molecule comprises the nucleotide sequence that encodes an Fc region comprising the amino acid sequence of any one of SEQ ID NOS: 21-37, 40-56 and 242-251 or a portion thereof.

[0164] In some embodiments, the nucleic acid molecule encodes an Fc region comprising an amino acid sequence that is at least 70%, 75%, 80%, 85%, 90%, 95%, 97%, 98% or 99% identical to any one of the amino acid sequences of any one of SEQ ID NO: 3-9, 12-18, 21-37, 40-56, 238-241, and 243-251. Optionally, the nucleic acid molecule encodes an Fc region comprising an amino acid sequence that is at least 70%, 75%, 80%, 85%, 90%, 95%, 97%, 98% or 99% similar to any one of the amino acid sequences of any one of SEQ ID NO: 3-9, 12-18, 21-37, 40-56, 238-241 and 243-251. Nucleic acid molecules may include nucleotide sequences that hybridize under highly stringent conditions to the complement of a nucleic acid encoding any one of the amino acid sequences of any one of SEQ ID NOs: 3-9, 12-18, 21-37, 40-56, 238-241 and 243-251. In some embodiments, the nucleic acid molecule encodes an Fc region comprising an amino acid sequence that is at least 70%, 75%, 80%, 85%, 90%, 95%, 97%, 98% or 99% identical to any one of the amino acid sequences of any one of SEQ ID NO: 3-9, 12-18, 21-37, 40-56, and 236-251. Optionally, the nucleic acid molecule encodes an Fc region comprising an amino acid sequence that is at least 70%, 75%, 80%, 85%, 90%, 95%, 97%, 98% or 99% similar to any one of the amino acid sequences of any one of SEQ ID NO: 3-9, 12-18, 21-37, 40-56, and 236-251. Nucleic acid molecules may include nucleotide sequences that hybridize under highly stringent conditions to the complement of a nucleic acid encoding any one of the amino acid sequences of any one of SEQ ID NOs: 3-9, 12-18, 21-37, 40-56, and 236-251. In some embodiments, the nucleic acid molecule encodes an Fc region comprising an amino acid sequence that is at least 70%, 75%, 80%, 85%, 90%, 95%, 97%, 98% or 99% identical to any one of the amino acid sequences of any one of SEQ ID NO: 21-37, 40-56, and 243-251. Optionally, the nucleic acid molecule encodes an Fc region comprising an amino acid sequence that is at least 70%, 75%, 80%, 85%, 90%, 95%, 97%, 98% or 99% similar to any one of the amino acid sequences of any one of SEQ ID NO: 21-37, 40-56, and 243-251. Nucleic acid molecules may include nucleotide sequences that hybridize under highly stringent conditions to the complement of a nucleic acid encoding any one of the amino acid sequences of any one of SEQ ID NOs: 21-37, 40-56, and 243-251. In some embodiments, the nucleic acid molecule encodes an Fc region comprising an amino acid sequence that is at least 70%, 75%, 80%, 85%, 90%, 95%, 97%, 98% or 99% identical to any one of the amino acid sequences of any one of SEQ ID NO: 21-37, 40-56, and 242-251. Optionally, the nucleic acid molecule encodes an Fc region comprising an amino acid sequence that is at least 70%, 75%, 80%, 85%, 90%, 95%, 97%, 98% or 99% similar to any one of the amino acid sequences of any one of SEQ ID NO: 21-37, 40-56, and 242-251. Nucleic acid molecules may include nucleotide sequences that hybridize under highly stringent conditions to the complement of a nucleic acid encoding any one of the amino acid sequences of any one of SEQ ID NOs: 21-37, 40-56, and 242-251.

[0165] In some embodiments, the nucleic acid molecule comprises a sequence encoding the light chain of an anti-CD154 antibody disclosed herein. Optionally, the nucleic acid molecule encoding the light chain comprises a nucleotide sequence selected from the group consisting of SEQ ID NOs: 197 and 198. In some embodiments, the nucleic acid molecule encoding the light chain comprises a nucleotide sequence that is at least 70%, 75%, 80%, 85%, 90%, 95%, 97%, 98% or 99% identical to a nucleotide sequence selected from the group consisting of SEQ ID NOs: 197 and 198. In some embodiments, the nucleic acid molecule encoding the light chain comprises a nucleotide sequence that hybridizes under highly stringent conditions to the complement of a nucleotide sequence selected from the group consisting of SEQ ID NOs: 197 and 198.

[0166] In some embodiments, the nucleic acid molecule comprises a nucleotide sequence that encodes a light chain comprising the amino acid sequence of any one of SEQ ID NOs: 195 and 196. In some embodiments, the nucleic acid molecule comprises the nucleotide sequence that encodes a light chain comprising the amino acid sequence of any one of SEQ ID NOS: 195 and 196 or a portion thereof.

[0167] In some embodiments, the nucleic acid molecule encodes a light chain amino acid sequence that is at least 70%, 75%, 80%, 85%, 90%, 95%, 97%, 98% or 99% identical to any one of the amino acid sequences of any one of SEQ ID NO: 195 and 196. Optionally, the nucleic acid molecule encodes a light chain amino acid sequence that is at least 70%, 75%, 80%, 85%, 90%, 95%, 97%, 98% or 99% similar to any one of the amino acid sequences of any one of SEQ ID NO: 195 and 196. Nucleic acid molecules may include nucleotide sequences that hybridize under highly stringent conditions to the complement of a nucleic acid encoding any one of the light chain amino acid sequences of any one of SEQ ID NOs: 195 and 196 or to the complement of a nucleic acid comprising the light chain nucleotide sequence of any one of SEQ ID NO: 197 and 198.

[0168] In some embodiments, the nucleic acid molecule comprises a sequence encoding the heavy chain of an anti-CD154 antibody disclosed herein. Optionally, the nucleic acid molecule encoding the heavy chain comprises a nucleotide sequence selected from the group consisting of any one of SEQ ID NOs: 177-179, 182-184, 187-189, and 192-194. In some embodiments, the nucleic acid molecule encoding the heavy chain comprises a nucleotide sequence that is at least 70%, 75%, 80%, 85%, 90%, 95%, 97%, 98% or 99% identical to a nucleotide sequence selected from the group consisting of any one of SEQ ID NOs: 177-179, 182-184, 187-189, and 192-194. In some embodiments, the nucleic acid molecule encoding the heavy chain comprises a nucleotide sequence that hybridizes under highly stringent conditions to the complement of a nucleotide sequence selected from the group consisting of SEQ ID NOs: 177-179, 182-184, 187-189, and 192-194.

[0169] In some embodiments, the nucleic acid molecule comprises a nucleotide sequence that encodes a heavy chain comprising the amino acid sequence of any one of SEQ ID NOs: 121-132, 135-146, 149-160, 163-174 and 266-288. In some embodiments, the nucleic acid molecule comprises the nucleotide sequence that encodes a heavy chain comprising the amino acid sequence of any one of SEQ ID NOS: 121-132, 135-146, 149-160, 163-174, and 266-288 or a portion thereof. In some embodiments, the nucleic acid molecule comprises a nucleotide sequence that encodes a heavy chain comprising the amino acid sequence of any one of SEQ ID NOs: 121-132, 135-146, 149-160, 163-174, 266-277 and 279-288. In some embodiments, the nucleic acid molecule comprises the nucleotide sequence that encodes a heavy chain comprising the amino acid sequence of any one of SEQ ID NOS: 121-132, 135-146, 149-160, 163-174, 266-277 and 279-288 or a portion thereof. In some embodiments, the nucleic acid molecule comprises a nucleotide sequence that encodes a heavy chain comprising the amino acid sequence of any one of SEQ ID NOs: 121-132, 135-146, 149, 151-160, 163, 165-174 and 266-288. In some embodiments, the nucleic acid molecule comprises the nucleotide sequence that encodes a heavy chain comprising the amino acid sequence of any one of SEQ ID NOS: 121-132, 135-146, 149, 151-160, 163, 165-174, and 266-288 or a portion thereof. In some embodiments, the nucleic acid molecule comprises a nucleotide sequence that encodes a heavy chain comprising the amino acid sequence of any one of SEQ ID NOs: 121-132, 135-146, 149, 151-160, 163, 165-174, 266-277 and 279-288. In some embodiments, the nucleic acid molecule comprises the nucleotide sequence that encodes a heavy chain comprising the amino acid sequence of any one of SEQ ID NOS: 121-132, 135-146, 149, 151-160, 163, 165-174, 266-277 and 279-288 or a portion thereof. In some embodiments, the nucleic acid molecule comprises a nucleotide sequence that encodes a heavy chain comprising the amino acid sequence of any one of SEQ ID NOs: 121-132, 135-146, 149, 151-160, 163, 165-174, 267-271, 273-277, and 279-288. In some embodiments, the nucleic acid molecule comprises the nucleotide sequence that encodes a heavy chain comprising the amino acid sequence of any one of SEQ ID NOS: 121-132, 135-146, 149, 151-160, 163, 165-174, 267-271, 273-277, and 279-288 or a portion thereof.

[0170] In some embodiments, the nucleic acid molecule encodes a heavy chain amino acid sequence that is at least 70%, 75%, 80%, 85%, 90%, 95%, 97%, 98% or 99% identical to any one of the amino acid sequences of any one of SEQ ID NO: 121-132, 135-146, 149-160, 163-174 and 266-288. Optionally, the nucleic acid molecule encodes a heavy chain amino acid sequence that is at least 70%, 75%, 80%, 85%, 90%, 95%, 97%, 98% or 99% similar to any one of the amino acid sequences of any one of SEQ ID NO: 121-132, 135-146, 149-160, 163-174 and 266-288. Nucleic acid molecules may include nucleotide sequences that hybridize under highly stringent conditions to the complement of a nucleic acid encoding any one of the heavy chain amino acid sequences of any one of SEQ ID NOs: 121-132, 135-146, 149-160, 163-174 and 266-288 or to the complement of a nucleic acid comprising the heavy chain nucleotide sequence of any one of SEQ ID NO: 177-179, 182-184, 187-189, 192-194, and 289-324. In some embodiments, the nucleic acid molecule encodes a heavy chain amino acid sequence that is at least 70%, 75%, 80%, 85%, 90%, 95%, 97%, 98% or 99% identical to any one of the amino acid sequences of any one of SEQ ID NO: 121-132, 135-146, 149-160, 163-174, 266-277, and 279-288. Optionally, the nucleic acid molecule encodes a heavy chain amino acid sequence that is at least 70%, 75%, 80%, 85%, 90%, 95%, 97%, 98% or 99% similar to any one of the amino acid sequences of any one of SEQ ID NO: 121-132, 135-146, 149-160, 163-174, 266-277, and 279-288. Nucleic acid molecules may include nucleotide sequences that hybridize under highly stringent conditions to the complement of a nucleic acid encoding any one of the heavy chain amino acid sequences of any one of SEQ ID NOs: 121-132, 135-146, 149-160, 163-174, 266-277, and 279-288 or to the complement of a nucleic acid comprising the heavy chain nucleotide sequence of any one of SEQ ID NO: 177-179, 182-184, 187-189, 192-194 and 289-324. In some embodiments, the nucleic acid molecule encodes a heavy chain amino acid sequence that is at least 70%, 75%, 80%, 85%, 90%, 95%, 97%, 98% or 99% identical to any one of the amino acid sequences of any one of SEQ ID NO: 121-132, 135-146, 149, 151-160, 163, 165-174, 266-277, and 279-288. Optionally, the nucleic acid molecule encodes a heavy chain amino acid sequence that is at least 70%, 75%, 80%, 85%, 90%, 95%, 97%, 98% or 99% similar to any one of the amino acid sequences of any one of SEQ ID NO: 121-132, 135-146, 149, 151-160, 163, 165-174, 266-277, and 279-288. Nucleic acid molecules may include nucleotide sequences that hybridize under highly stringent conditions to the complement of a nucleic acid encoding any one of the heavy chain amino acid sequences of any one of SEQ ID NOs: 121-132, 135-146, 149, 151-160, 163, 165-174, 266-277, and 279-288 or to the complement of a nucleic acid comprising the heavy chain nucleotide sequence of any one of SEQ ID NO: 177-179, 182-184, 187-189, 192-194 and 289-324. In some embodiments, the nucleic acid molecule encodes a heavy chain amino acid sequence that is at least 70%, 75%, 80%, 85%, 90%, 95%, 97%, 98% or 99% identical to any one of the amino acid sequences of any one of SEQ ID NO: 121-132, 135-146, 149, 151-160, 163, 165-174, 266-277, and 279-288. Optionally, the nucleic acid molecule encodes a heavy chain amino acid sequence that is at least 70%, 75%, 80%, 85%, 90%, 95%, 97%, 98% or 99% similar to any one of the amino acid sequences of any one of SEQ ID NO: 121-132, 135-146, 149, 151-160, 163, 165-174, 266-277, and 279-288. Nucleic acid molecules may include nucleotide sequences that hybridize under highly stringent conditions to the complement of a nucleic acid encoding any one of the heavy chain amino acid sequences of any one of SEQ ID NOs: 121-132, 135-146, 149, 151-160, 163, 165-174, 266-277, and 279-288 or to the complement of a nucleic acid comprising the heavy chain nucleotide sequence of any one of SEQ ID NO: 177-179, 182-184, 187-189, 192-194 and 289-324. In some embodiments, the nucleic acid molecule encodes a heavy chain amino acid sequence that is at least 70%, 75%, 80%, 85%, 90%, 95%, 97%, 98% or 99% identical to any one of the amino acid sequences of any one of SEQ ID NO: 121-132, 135-146, 149, 151-160, 163, 165-174, 267-271, and 273-288. Optionally, the nucleic acid molecule encodes a heavy chain amino acid sequence that is at least 70%, 75%, 80%, 85%, 90%, 95%, 97%, 98% or 99% similar to any one of the amino acid sequences of any one of SEQ ID NO: 121-132, 135-146, 149, 151-160, 163, 165-174, 267-271, and 273-288. Nucleic acid molecules may include nucleotide sequences that hybridize under highly stringent conditions to the complement of a nucleic acid encoding any one of the heavy chain amino acid sequences of any one of SEQ ID NOs: 121-132, 135-146, 149, 151-160, 163, 165-174, 267-271, and 273-288 or to the complement of a nucleic acid comprising the heavy chain nucleotide sequence of any one of SEQ ID NO: 177-179, 182-184, 187-189, 192-194 and 289-324. In some embodiments, the nucleic acid molecule does not encode a heavy chain comprising the amino acid sequence of SEQ ID NO: 164 or SEQ ID NO: 150. Optionally, the nucleic acid molecule does not comprise the nucleotide sequence of SEQ ID NO: 188 or SEQ ID NO: 183. In some embodiments, the nucleic acid molecule does not encode a heavy chain comprising the amino acid sequence of SEQ ID NO: 278 or SEQ ID NO: 234. Optionally, the nucleic acid molecule does not comprise the nucleotide sequence of SEQ ID NO: 299 or SEQ ID NO: 308. In some embodiments, the nucleic acid molecule encoding a heavy chain comprises the nucleotide sequence that is at least 70%, 75%, 80%, 85%, 90%, 95%, 97%, 98% or 99% identical to any one of SEQ ID NO: 177-179, 192-194, 289-297, and 316-324. Optionally, the nucleic acid molecule encoding a heavy chain comprises the nucleotide sequence that is at least 70%, 75%, 80%, 85%, 90%, 95%, 97%, 98% or 99% similar to any one of SEQ ID NO: 177-179, 192-194, 289-297, and 316-324. In some embodiments, the nucleic acid molecule encoding a heavy chain comprises the nucleotide sequence of any one of SEQ ID NO: 177-179, 192-194, 289-297, and 316-324.

[0171] A nucleic acid molecule encoding the heavy chain or light chain of an anti-CD154 antibody can be isolated from any source that produces such antibody. In various embodiments, the nucleic acid molecules are isolated from a B cell that expresses an anti-CD154 antibody isolated from an animal immunized with CD154 or from an immortalized cell derived from such a B cell. Methods of isolating nucleic acids encoding an antibody are well-known in the art. See, e.g., Sambrook J. & Russell D., Molecular Cloning: A Laboratory Manual, 3rd ed., Cold Spring Harbor Laboratory Press, Cold Spring Harbor, N.Y. (2000). In another embodiment, the nucleic acid is isolated from a non-human, non-transgenic animal. The nucleic acid molecules isolated from a non-human, non-transgenic animal may be used, e.g., for humanized antibodies that comprise one or more amino acid sequences from a human anti-CD154 antibody disclosed herein.

### Vectors

[0172] A third aspect of the present disclosure provides vectors comprising the disclosed nucleic acid molecules. In some embodiments, the vector comprises a nucleotide sequence that encodes the heavy chain of a disclosed anti-CD154 antibody. Optionally, the vector comprises a nucleotide sequence that encodes the light chain of a disclosed antibody. The vector may comprise a nucleotide sequence encoding the heavy chain and the light chain of a disclosed anti-CD154 antibody.

[0173] In some embodiments, the anti-CD154 antibodies are expressed by inserting DNAs encoding partial or full-length light and/or heavy chains, obtained as described above, into expression vectors such that the genes are operatively linked to expression control sequences, such as transcriptional and translational control sequences. In some embodiments, the DNAs encoding partial light and/or heavy chains may contain VH and/or VL sequences. Expression vectors include plasmids, retroviruses, adenoviruses, adeno-associated viruses (AAV), plant viruses such as cauliflower mosaic virus, tobacco mosaic virus, cosmids, YACs, EBV derived episomes, and the like. The polynucleotide encoding the heavy and/or light chain may be ligated into a vector such that transcriptional and translational control sequences within the vector serve their intended function of regulating the transcription and translation of the polynucleotide. The expression vector and expression control sequences may be chosen to be compatible with the expression host cell used. The antibody light chain gene and the antibody heavy chain gene may be inserted into separate vectors. In some embodiments, both genes are inserted into the same expression vector. In some embodiments, the polynucleotides encoding VH and/or VL sequences are inserted into an expression vector comprising CH and/or CL nucleotide sequences. Optionally, the polynucleotides encoding the VH sequence is inserted into an expression vector comprising an Fc domain nucleotide sequence. In some embodiments, the polynucleotides encoding the VH sequence is inserted into an expression vector comprising an Fc region nucleotide sequence. The polynucleotides encoding the heavy and/or light chain are inserted into the expression vector by standard methods (e.g., ligation of complementary restriction sites on the antibody gene fragment and vector, or blunt end ligation if no restriction sites are present).

[0174] A convenient vector may be one that encodes a functionally complete CH or CL immunoglobulin sequence, with appropriate restriction sites engineered so that any VH or VL nucleotide sequence can easily be inserted 5′ of the CH or CL nucleotide sequence and expressed, as described above. In such vectors, splicing usually occurs between the splice donor site in the inserted J region and the splice acceptor site preceding the C domain, and also at the splice regions that occur within the CH exons. Optionally, the vector encodes an Fc domain with modified effector functions with appropriate restriction sites engineered so that a VH nucleotide sequence can be easily inserted 5′ of the Fc domain nucleotide sequence and expressed. In some embodiments, the vector comprises a sequence encoding a linker that is 5′ to the sequence encoding the Fc domain with appropriate restriction sites engineered so that a VH nucleotide sequence can be easily inserted 5′ of the linker sequence and expressed. Optionally, the vector encodes an Fc region with modified effector functions with appropriate restriction sites engineered so that a VH nucleotide sequence can be easily inserted 5′ of the Fc region nucleotide sequence and expressed. In some embodiments, the vector comprises a sequence encoding a linker that is 5′ to the sequence encoding the Fc region with appropriate restriction sites engineered so that a VH nucleotide sequence can be easily inserted 5′ of the linker polynucleotide sequence and expressed. In some embodiments, the vector comprises a sequence encoding a CH1 domain that is 5′ to the sequence encoding the Fc region with appropriate restriction sites engineered so that a VH nucleotide sequence can be easily inserted 5′ of the CH1 domain polynucleotide sequence and expressed.

[0175] In some embodiments, the vector comprises a polyadenylation and/or transcription termination sequence downstream of the coding regions. The recombinant expression vector also may encode a signal peptide that facilitates secretion of the antibody chain from a host cell. The antibody chain gene may be cloned into the vector such that the signal peptide is linked in-frame to the amino terminus of the immunoglobulin chain. Optionally, the signal peptide is an immunoglobulin signal peptide or a heterologous signal peptide (i.e., a signal peptide from a non-immunoglobulin protein).

[0176] In addition to the antibody chain coding sequences, the recombinant expression vectors may optionally carry regulatory sequences that control the expression of the antibody chain coding sequences in a host cell. It will be appreciated by those skilled in the art that the design of the expression vector, including the selection of regulatory sequences may depend on such factors as the choice of the host cell to be transformed, the level of expression of protein desired, etc. Preferred regulatory sequences for mammalian host cell expression include viral elements that direct high levels of protein expression in mammalian cells, such as promoters and/or enhancers derived from retroviral long terminal repeats (LTRs), cytomegalovirus (CMV) (such as the CMV promoter/enhancer), Simian Virus 40 (SV40) (such as the SV40 promoter/enhancer), adenovirus, (e.g., the adenovirus major late promoter (AdMLP)), polyoma and strong mammalian promoters such as native immunoglobulin and actin promoters. For further description of viral regulatory elements, and sequences thereof, see e.g., U.S. Pat. Nos. 5,168,062, 4,510,245 and 4,968,615. Methods for expressing antibodies in plants, including a description of promoters and vectors, as well as transformation of plants is known in the art. See, e.g., U.S. Pat. No. 6,517,529, incorporated herein by reference. Methods of expressing polypeptides in bacterial cells or fungal cells, e.g., yeast cells, are also well known in the art.

[0177] In addition to the antibody chain coding sequences and regulatory sequences, the recombinant expression vectors disclosed herein may carry additional sequences, such as sequences that regulate replication of the vector in host cells (e.g., origins of replication) and selectable marker genes. Optionally, the vector comprises a selectable marker gene to facilitate selection of host cells into which the vector has been introduced (see e.g., U.S. Pat. Nos. 4,399,216, 4,634,665 and 5,179,017, incorporated herein by reference). For example, the selectable marker gene may confer resistance to a drug, such as Geneticin (G418), hygromycin or methotrexate, on a host cell into which the vector has been introduced. For example, selectable marker genes include the dihydrofolate reductase (DHFR) gene (for use in DHFR-deficient host cells with methotrexate selection/amplification), the neomycin resistance (neo) gene (for G418 selection), and the glutamate synthetase gene.

### Host Cells and Methods of Recombinantly Producing Protein

[0178] Any of the nucleic acid molecules encoding anti-CD154 antibodies disclosed herein and vectors comprising these nucleic acid molecules can be used for transfection of a suitable mammalian, plant, or yeast host cell or transformation of a bacterial host cell. Methods for transfecting/transforming a host cell with a polynucleotide are well known in the art. For example, methods for introduction of heterologous polynucleotides into mammalian cells are well known in the art and include, without limitation, dextran-mediated transfection, calcium phosphate precipitation, polybrene-mediated transfection, protoplast fusion, electroporation, encapsulation of the polynucleotide(s) in liposomes, and direct microinjection of the DNA into nuclei. In addition, nucleic acid molecules may be introduced into mammalian cells by viral vectors. Methods of transforming cells are well known in the art. See, e.g., U.S. Pat. Nos. 4,399,216, 4,912,040, 4,740,461, and 4,959,455, each incorporated herein by reference. Methods of transforming plant cells are well known in the art, including, e.g., Agrobacterium-mediated transformation, biolistic transformation, direct injection, electroporation, and viral transformation. Methods of transforming bacterial and yeast cells are also well known in the art.

[0179] Mammalian cell lines available as hosts for expression are well known in the art and include many immortalized cell lines available from the American Type Culture Collection (ATCC). Non-limiting examples include, inter alia, Chinese hamster ovary (CHO) cells, NS0 cells, SP2 cells, HEK-293T cells, 293 Freestyle cells (Invitrogen), NIH-3T3 cells, HeLa cells, baby hamster kidney (BHK) cells, African green monkey kidney cells (COS), human hepatocellular carcinoma cells (e.g., Hep G2), A549 cells, and a number of other cell lines. Other cell lines that may be used are insect cell lines, such as Sf9 or Sf21 cells. Plant host cells include, e.g., Nicotiana, Arabidopsis, duckweed, corn, wheat, potato, etc. Bacterial host cells include E. coli and Streptomyces species. Yeast host cells include Schizosaccharomyces pombe, Saccharomyces cerevisiae and Pichia pastoris. It is within the skill in the art to select cell lines based on particular characteristics, such as expression level and glycosylation pattern. When recombinant expression vectors encoding antibody chains are introduced into mammalian host cells, the antibodies are produced by culturing the host cells for a period of time sufficient to allow for expression of the antibody in the host cells or, more preferably, secretion of the antibody into the culture medium in which the host cells are grown. Antibodies can be recovered from the culture medium or the host cell using standard protein purification methods.

[0180] Further, expression of the disclosed antibodies from production cell lines can be enhanced using a number of known techniques. For example, the glutamine synthetase gene expression system (the GS system) is a common approach for enhancing expression under certain conditions. See, e.g., European Patent Nos. 0216846, 0256055, 0323997 and 0338841, each incorporated herein by reference.

[0181] Antibodies expressed by different cell lines or in transgenic animals may have different glycosylation patterns. The antibodies disclosed herein may be expressed by any suitable host cell line and, therefore, may have any glycosylation pattern.

### Pharmaceutical Compositions and Administration

[0182] A fourth aspect of the present disclosure provides a pharmaceutical composition comprising an anti-CD154 antibody described herein and a pharmaceutically acceptable carrier. In some embodiments, the pharmaceutical composition comprises a therapeutically effective amount of the anti-CD154 antibody described herein.

[0183] The antibodies disclosed herein may be incorporated into pharmaceutical compositions suitable for administration to a subject. Typically, the pharmaceutical composition comprises an antibody disclosed herein and a pharmaceutically acceptable carrier. As used herein, “pharmaceutically acceptable carrier” and “pharmaceutically acceptable excipient” are used interchangeably refer to any and all solvents, dispersion media, coatings, antibacterial and antifungal agents, isotonic and absorption delaying agents, and the like that are physiologically compatible. Pharmaceutically acceptable carriers are well known in the art. See, e.g., Remington's Pharmaceutical Sciences and U.S. Pharmacopeia: National Formulary, Mack Publishing Company, Easton, Pa. (1984), incorporated herein by reference. Some examples of pharmaceutically acceptable carriers are water, saline, phosphate buffered saline, dextrose, glycerol, ethanol and the like, as well as combinations thereof. In many cases, it will be preferable to include isotonic agents, for example, sugars, polyalcohols such as mannitol, sorbitol, or sodium chloride in the composition. Additional examples of pharmaceutically acceptable substances are wetting agents or minor amounts of auxiliary substances such as wetting or emulsifying agents, preservatives, or buffers, which enhance the shelf life or effectiveness of the antibody. Pharmaceutical compositions may be prepared by mixing an antibody disclosed herein with acceptable carriers, excipients, or stabilizers in the form of, e.g., lyophilized powders, slurries, aqueous solutions or suspensions (see, e.g., Hardman, et al. (2001) Goodman and Gilman's The Pharmacological Basis of Therapeutics, McGraw-Hill, New York, N.Y.; Gennaro (2000) Remington: The Science and Practice of Pharmacy, Lippincott, Williams, and Wilkins, New York, N.Y.; Avis, et al. (eds.) (1993) Pharmaceutical Dosage Forms: Parenteral Medications, Marcel Dekker, NY; Lieberman, et al. (eds.) (1990) Pharmaceutical Dosage Forms: Tablets, Marcel Dekker, NY; Lieberman, et al. (eds.) (1990) Pharmaceutical Dosage Forms: Disperse Systems, Marcel Dekker, NY; Weiner and Kotkoskie (2000) Excipient Toxicity and Safety, Marcel Dekker, Inc., New York, N.Y.; each incorporated herein by reference).

[0184] The pharmaceutical compositions may be in a variety of forms, for example, liquid, semi-solid and solid dosage forms, such as liquid solutions (e.g., injectable and infusible solutions), dispersions or suspensions, tablets, pills, powders, liposomes and suppositories. The preferred form depends on the intended mode of administration and therapeutic application. In some embodiments, the pharmaceutical compositions are in the form of injectable or infusible solutions, such as compositions similar to those used for passive immunization of humans. Optionally, mode of administration is parenteral (e.g., intravenous, subcutaneous, intraperitoneal, intramuscular). In some embodiments, the mode of administration is intravitreal injection. The pharmaceutical composition may be administered by intravenous infusion or injection. In some embodiments, the antibody is administered by intramuscular or subcutaneous injection. Formulations for injection may be presented in unit dosage form, e.g., in ampoules, pre-filled syringes, or in multi-dose containers, with or without an added preservative. The pharmaceutical compositions may take such forms as suspensions, solutions, or emulsions in oily or aqueous vehicles, and may contain formulatory agents such as suspending, stabilizing and/or dispersing agents. Alternatively, the active ingredient may be prepared in powder form for reconstitution with a suitable vehicle, e.g., sterile pyrogen-free water, before use.

[0185] Therapeutic compositions typically must be sterile and stable under the conditions of manufacture and storage. The composition may be formulated as a solution, microemulsion, dispersion, liposome, or other ordered structure suitable to high drug concentration. Sterile injectable solutions may be prepared by incorporating the anti-CD154 antibody in the required amount in an appropriate solvent with one or a combination of ingredients enumerated above, as required, followed by filtered sterilization. Dispersions may be prepared by incorporating the anti-CD154 antibody into a sterile vehicle that contains a basic dispersion medium and the required other ingredients from those enumerated above. In the case of sterile powders for the preparation of sterile injectable solutions, the preferred methods of preparation include vacuum drying and freeze-drying that yield a powder of the anti-CD154 antibody and any additional desired ingredient from a previously sterile-filtered solution thereof. The proper fluidity of a solution can be maintained, for example, by the use of a coating such as lecithin, by the maintenance of the required particle size in the case of dispersion and/or by the use of surfactants. Prolonged absorption of injectable compositions can be brought about by including in the composition an agent that delays absorption, for example, monostearate salts and gelatin.

[0186] The pharmaceutical compositions may be administered by a variety of methods known in the art. In some embodiments, the preferred route/mode of administration is subcutaneous, intramuscular, or intravenous infusion. In some embodiments, the mode of administration is intravitreal. As will be appreciated by the skilled artisan, the route and/or mode of administration will vary depending upon the desired results.

[0187] In some embodiments, the pharmaceutical compositions may be prepared with a carrier that will protect the antibody against rapid release, such as a controlled release formulation, including implants, transdermal patches, and microencapsulated delivery systems. Biodegradable, biocompatible polymers, such as ethylene vinyl acetate, polyanhydrides, polyglycolic acid, collagen, polyorthoesters, and polylactic acid, may be used. Methods for the preparation of such formulations are generally known to those skilled in the art. See, e.g., Sustained and Controlled Release Drug Delivery Systems J. R. Robinson, ed., Marcel Dekker, Inc., New York, 1978, which is incorporated herein by reference.

[0188] Additional active compounds also can be incorporated into the compositions. In certain embodiments, an anti-CD154 antibody disclosed herein is co-formulated with and/or co-administered with one or more additional therapeutic agents. These agents include, without limitation, antibodies that bind other targets, anti-thrombotic drugs, anti-platelet drugs, non-steroidal anti-inflammatory drugs (NSAIDs) and anti-allergy drugs. Such combination therapies may require lower dosages of the anti-CD154 antibody as well as the co-administered agents, thus avoiding possible toxicities or complications associated with the various monotherapies.

[0189] Dosage regimens may be adjusted to provide the optimum desired response (e.g., a therapeutic or prophylactic response). For example, a single bolus can be administered, several divided doses can be administered over time or the dose can be proportionally reduced or increased as indicated by the exigencies of the therapeutic situation. It may be advantageous to formulate parenteral compositions in dosage unit form for ease of administration and uniformity of dosage. The term “dosage unit form” as used herein refers to physically discrete units suited as unitary dosages for the mammalian subjects to be treated; each unit containing a predetermined quantity of active compound calculated to produce the desired therapeutic effect in association with the required pharmaceutical carrier. The specification for the dosage unit forms may be dictated by and directly dependent on (a) the unique characteristics of the anti-CD154 antibody and the particular therapeutic or prophylactic effect to be achieved, and (b) the limitations inherent in the art of compounding such an antibody for the treatment of sensitivity in individuals.

[0190] An exemplary, non-limiting range for a therapeutically or prophylactically effective amount of an antibody disclosed herein is 5 to 50 mg/kg. The therapeutically or prophylactically effective amount of an antibody disclosed herein may be about 5 to about 50 mg/kg. In some embodiments, a therapeutically or prophylactically effective amount of an antibody disclosed herein is 5 to 30 mg/kg. The therapeutically or prophylactically effective amount of an antibody disclosed herein may be about 5 to about 30 mg/kg. Optionally, the therapeutically or prophylactically effective amount of an antibody disclosed herein is 5 mg/kg, 10 mg/kg, 15 mg/kg, 20 mg/kg, 25 mg/kg, 30 mg/kg, 35 mg/kg, 40 mg/kg, 45 mg/kg or 50 mg/kg. In some embodiments, the therapeutically or prophylactically effective amount of an antibody disclosed herein is about 5 mg/kg, about 10 mg/kg, about 15 mg/kg, about 20 mg/kg, about 25 mg/kg, about 30 mg/kg, about 35 mg/kg, about 40 mg/kg, about 45 mg/kg or about 50 mg/kg. Dosage values may vary with the type and severity of the condition to be alleviated. For any particular subject, specific dosage regimens may be adjusted over time according to the individual need and the professional judgment of the person administering or supervising the administration of the compositions, and that dosage ranges set forth herein are exemplary only and are not intended to limit the scope or practice of the paragraphed composition.

### Therapeutic Methods of Use

[0191] A fifth aspect of the present disclosure provides a method for inhibiting CD154 activity. In some embodiments, CD154 activity is inhibit by contacting CD154 with an anti-CD154 antibody disclosed herein. Optionally, CD154 is inhibited by administering an anti-CD154 antibody disclosed herein to a subject in need thereof. In some embodiments, a therapeutically effective amount of the anti-CD154 antibody is administered. Optionally, the anti-CD154 is administered in a pharmaceutical composition disclosed herein.

[0192] A sixth aspect of the present disclosure provides a method of inhibiting an immune response in a subject. In some embodiments, the immune response is inhibited by administering an anti-CD154 antibody disclosed herein to a subject in need thereof. Optionally, a therapeutically effective amount of the anti-CD154 antibody is administered. In some embodiments, the anti-CD154 is administered in a pharmaceutical composition disclosed herein. The immune response may be a humoral response, such as an antibody-mediated response. The immune response may be a cell-mediated response, such as one or more of a cytotoxic T-cell mediated immune response, a macrophage mediated response, a natural killer (NK) cell mediated immune response or a cytokine mediated response. The immune response could be a mixed humoral and cell-mediated response. The immune response may be a primary response or a secondary response.

[0193] Any of the antibodies disclosed herein may be used therapeutically. In some embodiments, the anti-CD154 antibody is a human, chimeric or humanized antibody. Optionally, the subject is a human. The subject may be a non-human, such as a monkey. Optionally, the anti-CD154 antibody is human antibody, and the subject is human. In some embodiments, the anti-CD154 antibody is a humanized antibody, and the subject is human. Alternatively, the subject may be a mammal (e.g. a monkey) that expresses CD154 that the anti-CD154 antibody cross-reacts with. The antibody may be administered to a non-human mammal expressing CD154 with which the antibody cross-reacts (e.g. a cynomolgus monkey) for veterinary purposes or as an animal model of human transplantation or disease. Such animal models may be useful for evaluating the therapeutic efficacy of antibodies disclosed herein.

[0194] The antibody may be administered once. Optionally, the antibody is administered multiple times. The antibody may be administered from three times daily to once every six months or longer. The administering may be on a schedule such as three times daily, twice daily, once daily, once every two days, once every three days, once weekly, once every two weeks, once every month, once every two months, once every three months, once every six months, twice weekly, three times weekly, four times weekly, twice every two weeks, three times every two weeks and four times every two weeks. The antibody may also be administered continuously via a minipump. The antibody may be administered via a mucosal, buccal, intranasal, inhalable, intravenous, intravitreal, subcutaneous, intramuscular, parenteral, or intratumor route. In some embodiments, the anti-CD154 antibody is administered systemically, such as subcutaneously, intravenously, orally, via inhalation, transdermally, or rectally. Optionally, the anti-CD154 antibody is administered locally. In some embodiments, the anti-CD154 antibody is administered intravitreally. The antibody may be administered once, at least twice or for at least the period of time until the condition is treated, palliated or cured. The antibody generally will be administered for as long as the condition is present. The antibody will generally be administered as part of a pharmaceutical composition as described supra. The dosage of antibody will generally be in the range of 5 to 50 mg/kg. The dosage of antibody may be about 5 to about 50 mg/kg. In some embodiments, dosage of antibody is 5 to 30 mg/kg. The dosage of antibody may be about 5 to about 30 mg/kg. Optionally, the dosage of antibody is 5 mg/kg, 10 mg/kg, 15 mg/kg, 20 mg/kg, 25 mg/kg, 30 mg/kg, 35 mg/kg, 40 mg/kg, 45 mg/kg or 50 mg/kg. In some embodiments, the dosage of antibody is about 5 mg/kg, about 10 mg/kg, about 15 mg/kg, about 20 mg/kg, about 25 mg/kg, about 30 mg/kg, about 35 mg/kg, about 40 mg/kg, about 45 mg/kg or about 50 mg/kg.

[0195] In some embodiments, an anti-CD154 antibody disclosed herein is administered to a subject who expresses inappropriately high levels of CD154. Optionally, the subject has received or will receive a cell, tissue, or organ transplant. The transplant may be an allogeneic transplant, autologous transplant or a xenogeneic transplant of a cell, tissue, or organ. The cell may be an engineered cell or an ex-vivo expanded cell. For example, the cell may be modified using one or more techniques such as transduction to express a cDNA, a CRISPR/Cas9 system, RNAi technology and retroviral technology. Optionally, the cell is modified to express a chimeric antigen receptor (CAR) on its surface. Examples of cells that may be transplanted include, but are not limited to a stem cell, a regulatory T (Treg) cell, a CAR-T cell, a CAR-B cell, and a tumor-infiltrating lymphocyte (TIL).

[0196] In some embodiments, any of the anti-CD154 antibodies of the disclosure disclosed herein may be administered to a subject in order to prevent a transplant rejection in the subject. For example, the anti-CD154 antibody may be administered to prevent an acute or a chronic humoral rejection of a grafted cell, tissue, or organ. The rejection may be an acute or chronic graft rejection in a graft recipient of an allogeneic transplant or xenotransplant. The methods disclosed herein may promote a long-term graft survival of the grafted cell, tissue, or organ. Optionally, the long-term graft survival is at least 6 months post-transplant, at least 1 year post-transplant or at least 5 years post-transplant.

[0197] The transplant rejection may be associated with the transplantation of hematopoietic cell or bone marrow, an allogeneic transplant of pancreatic islet cells, graft vs host disease, or a solid organ transplant selected from the group consisting of a heart transplant, a kidney transplant, a liver transplant, a lung transplant, a pancreas transplant, a kidney-pancreas transplant, a heart-lung transplant, kidney-heart transplant, a kidney-heart-pancreas transplant, a heart-liver transplant, a heart-liver-kidney transplant, a heart-lung-kidney transplant, a heart-lung-liver transplant, a lung-kidney transplant, a lung-liver transplant, a liver-intestines-pancreas transplant, an intestines-pancreas transplant, a liver-kidney-intestines-pancreas transplant, and a kidney-intestines transplant.

[0198] In some embodiments, any of the anti-CD154 antibodies disclosed herein may be administered to a subject having one or more of an immune-related disease, atherosclerotic disorder, or neurodegenerative disorder. A subject may also have had or is at risk of having one or more of a stroke, a transient ischemic attack (TIA), an aneurysm, or a dissecting aneurysm.

[0199] Examples of immune-related diseases that may be treated/prevented by the compositions/methods disclosed herein include, but are not limited to, type I diabetes, juvenile diabetes, autoimmune diabetes, autoimmune hemolytic anemia, rheumatoid arthritis, systemic lupus erythematosus (SLE), psoriasis, multiple sclerosis, inflammatory bowel disease, Addison's disease, Crohn's disease, Graves' disease, Sjögren's syndrome, Hashimoto's thyroiditis, myasthenia gravis, vasculitis, pernicious anemia, celiac diseases, Guillain-Barre syndrome, ankylosing spondylitis, primary biliary cirrhosis, lupus nephritis, Goodpasture's disease, polymyositis, dermatomyositis, psoriasis, temporal arteritis, Churg-Strauss syndrome, transverse myelitis, thyroiditis, ulcerative colitis, sarcoidosis, hemolytic anemia, idiopathic thrombocytopenic purpura, neuromyelitis optica spectrum disorder, paroxysmal nocturnal hemoglobinuria, atypical hemolytic uremic syndrome, dysfunctional immune responses associated with viral-mediated diseases, cytokine release syndrome (CRS), cytokine storm syndrome, Behcet's disease, diabetic retinopathy (DR), diabetic macular edema (DME), wet age-related macular degeneration (AMD), and macular edema following retinal vein occlusion (MEfRVO). An immune-related disease may also include allergic conditions which include, but not limited to, allergic rhinitis, asthma, atopic eczema, anaphylaxis, insect venom allergy, drug allergy, and food allergy. Optionally, the immune-related disease is an inflammatory condition of an organ. In some embodiments, the organ is selected from the group consisting of lung, heart, and kidney. Optionally, the organ is lung. In some embodiments, the immune-related disease is acute respiratory distress syndrome (ARDS), pneumonia, bronchitis, pneumonitis, and chronic obstructive pulmonary disease (COPD). The immune-related disease may be selected from the group consisting of ARDS, pneumonia, and pneumonitis. Optionally, the immune-related disease is ARDS. In some embodiments, the immune-related disease is a condition associated with a cytokine storm in the host, cytokine release syndrome (CRS), or a cytokine storm syndrome.

[0200] In some embodiments, the immune-related disease is a dysfunctional immune response associated with a viral infection. Optionally, the virus is selected from the group consisting of a cytomegalovirus, an Epstein-Barr virus, an influenza virus, a variola virus, an orthopoxvirus, a coronavirus, such as SARS coronavirus (SARS-CoV), SARS-CoV-2, and MERS-CoV. In some embodiments, the virus is selected from the group consisting of SARS-CoV, SARS-CoV-2, and MERS-CoV. The virus may be SARS-CoV-2. In some embodiments, the immune-related disease is selected from the group consisting of severe acute respiratory syndrome (SARS), Middle East respiratory syndrome (MERS), coronavirus disease 2019 (COVID-19), cytokine release syndrome (CRS), and cytokine storm syndrome. The immune-related disease may be selected from the group consisting of severe acute respiratory syndrome (SARS), Middle East respiratory syndrome (MERS), coronavirus disease 2019 (COVID-19) and influenza. Optionally, the immune-related disease is COVID-19.

[0201] Examples of neurodegenerative disorders that may be treated/prevented by the compositions/methods disclosed herein include, but are not limited to Alzheimer's disease, traumatic brain injury (TBI), chronic traumatic encephalitis (CTE), and Parkinson's disease.

[0202] Examples of atherosclerotic disorder that may be treated/prevented by the compositions/methods disclosed herein include, but are not limited to angina pectoris myocardial infarction, carotid stenosis, transient ischemic attacks and cerebral vascular accident (CVA).

[0203] In some embodiments, the method comprises administering to said mammal a therapeutically effective amount of an anti-CD154 antibody disclosed herein in combination with one or more additional agents. Optionally, the one or more additional agents is selected from the group consisting of anti-thrombotic drugs, anti-platelet drugs and non-steroidal anti-inflammatory drugs (NSAIDs). The anti-CD154 antibody may be administered simultaneously with the one or more additional agents. In some embodiments, the anti-CD154 antibody is administered sequentially with the one or more additional agents. Optionally, the anti-CD154 antibody is administered prior to the one or more additional agents. The anti-CD154 antibody may be administered subsequent to the one or more additional agents. In some embodiments, the anti-CD154 antibody is administered in the same composition as the one or more additional agents. Optionally, the anti-CD154 antibody and the one or more additional agents are administered in separate compositions.

[0204] Examples of anti-thrombotic drugs include but are not limited to a glycoprotein IIb/IIIa receptor antagonist, a direct or indirect factor Xa inhibitor and an anticoagulant. Examples of anticoagulants include, but are not limited to, heparin, warfarin, rivaroxaban (XARELTO®), ximelgatran (EXANTA®), dabigatran (PRADAXA®), apixaban (ELIQUIS®), edoxaban (SAVAYSA®), enoxaparin (LOVENOX®), and fondaparinux (ARIXTRA®). Examples of anti-thrombotic drugs include, but are not limited to, those disclosed in U.S. Pat. Nos. 4,782,069; 5,332,822; 5,492,895; 5,612,363, 5,691,364 5,693,641; 5,721,214; 5,726,173; 5,753,635; 5,846,970; 5,849,759; 5,889,005; 6,107,280; 6,140,351; 6,150,329; 6,180,627; 6,200,976; 6,242,432; 6,248,770; 6,271,215; 6,280,731; 6,287,794; 6,300,330; 6,300,342; 6,333,338; 6,395,731; 6,417,203; 6,432,955; 6,444,672; 6,451,832; 6,458,793; 6,486,129; 6,500,803; 6,583,173; 6,599,881; 6,723,723; 6,730,672; 6,753,331; 6,774,110; 6,797,710; and 6,924,296, incorporated in their entirety for all purposes. Examples of glycoprotein IIb/IIIa receptor antagonists include, but are not limited to, abciximab (REOPRO®), rivaroxaban (XARELTO®), apixaban (ELIQUIS®), edoxaban (SAVAYSA®), idrabiotaparinux, tirofiban (AGGRASTAT®), and eptifibatide (INTEGRILIN®). The direct or indirect factor Xa inhibitors include, but are not limited to, apixaban (ELIQUIS®), idrabiotaparinux, fondaparinux (ARIXTRA®), and rivaroxaban (XARELTO®).

[0205] Examples of anti-platelet drugs include, but are not limited to, TXA2 pathway inhibitors, the adenosine diphosphate (ADP) pathway inhibitors, thrombin inhibitors, Protease activated receptor-1 (PAR-1) inhibitors and phosphodiesterase (PDE) inhibitors. Examples of ADP pathway inhibitors include, but are not limited, to clopidogrel (PLAVIX®, ticlopidine (TICLID®), prasugrel (EFFIENT®), ticagrelor (BRILINTA®), cangrelor (KENGREAL®) and elinogrel. Non-limiting examples of PDE inhibitors include dipyridamole (PERSANTINE®) and cilostazol (PLETAL®).

[0206] Examples of NSAIDs include, but are not limited to, acetylsalicylic acid, celecoxib (CELEBREX®), diclofenac (VOLTAREN®, PENNSAID®, SOLARAZE®, ZIPSOR®, CATAFLAM®, ZORVOLEX®), diflunisal (DOLOBID®), etodolac (LODINE SR®, ECCOXOLAC®), ibuprofen (BRUFEN®, ADVIL®, MOTRIN®), indomethacin (INDOCIN®), ketoprofen (ORUDIS®), ketorolac (TORADOL®, ACULAR®, SPRIX®), nabumetone (RELAFEN®), naproxen (AFLAXEN®, ALEVE®, ANAPROX®, NAPRELAN®), oxaprozin (DAYPRO®, DAYRUN®, DURAPROX®), piroxicam (FELDENE®), salsalate (MONO-GESIC®, SALFLEX®, DISALCID®, SALSITAB®), sulindac (CLINORIL®), tolmetin (TOLECTIN®), prasugrel (EFFIENT®), ticagrelor (BRILINTA®) and cangrelor (KENGREAL®).

[0207] In some embodiments, the anti-CD154 antibody may be administered in combination with one or more supplemental agents including but not limited to immunosuppressive drugs, immunomodulatory drugs, and monoclonal and/or polyclonal antibodies. The anti-CD154 antibody may be administered simultaneously with the one or more supplemental agents. In some embodiments, the anti-CD154 antibody is administered sequentially with the one or more supplemental agents. Optionally, the anti-CD154 antibody is administered prior to the one or more supplemental agents. The anti-CD154 antibody may be administered subsequent to the one or more supplemental agents. In some embodiments, the anti-CD154 antibody is administered in the same composition as the one or more supplemental agents. Optionally, the anti-CD154 antibody and the one or more supplemental agents are administered in separate compositions. Examples of such one or more supplemental agents include, but not limited to, anti-CD2 antibodies, anti-CD3 antibodies, anti-CD4 antibodies, anti-CD28 antibodies, anti-CD52 antibodies, anti-C5 antibodies, mTOR inhibitors, calcineurin inhibitors, antiviral drugs, and fusion peptides that bind to and block the function of CD28. Non-limiting examples of fusion peptides that bind to and block the function of CD28 include abatacept and belatocept (NULOJIX®). For example, the anti-CD52 antibody may be alemtuzumab (CAMPATH®). Optionally, the anti-C5 antibody is eculizumab (SOLIRIS®).

[0208] Non-limiting examples of immunosuppressive drug or immunomodulatory drugs include cyclosporine A, tacrolimus (FK-506), doxorubicin (ADRIAMYCIN®), azathioprine (IMURAN®), busulfan (BUSULFEX®), cyclophosphamide (CYTOXAN®), fludarabine, 5-fluorouracil, methotrexate (OTREXUP®, RASUVO®, RHEUMATREX®, TREXALL™), mycophenolate mofetil (CELLCEPT®), mizoribine (BREDININ™), leflunomide, a nonsteroidal anti-inflammatory, adrenocortical steroids, rapamycin (RAPAMUNE®), deoxyspergualin, FTY720, muromonab-CD3 (ORTHOCLONE OKT3®), alemtuzumab (CAMPATH®, MABCAMPATH®, CAMPATH-1H®, LEMTRADA®), basiliximab (SIMULECT®), daclizumab (ZINBRYTA®), eculizumab (SOLIRIS®), rituximab (RITUXAN®, MABTHERA®), bortezomib (VELCADE®, CHEMOBORT®, BORTECAD®), siplizumab, anti-thymocyte globulin (THYMOGLOBULIN®, ATGAM®), leronlimab, siltuximbab (SYLVANT®), sarilumab (KEVZARA®), tocilizumab (ACTEMRA®), bevacizumab (AVASTIN®), ranibizumab (LUCENTIS®), aflibercept (EYLEA®) and inhibitors of Bruton's tyrosine kinase (BTK), including zanubrutinib (BRUKINSA®), acalabrutinib (CALQUENCE®) and ibrutinib (IMBRUVICA®).

[0209] Examples of mTOR inhibitors include, but are not limited to, rapamycin (Rapamune®), everolimus (AFINITOR®), temsirolimus (TORISEL®), ridaforolimus, and deforolimus. Examples of calcineurin inhibitors include, but are not limited to, cyclosporine (NEORAL®, SANDIMMUNE®, GENGRAF®, RESTASIS®), tacrolimus (FK506, ENVARSUS®, HECORIA®, PROGRAF® PROTOPIC®, ASTRAGRAF®), and pimecrolimus (ELIDEL®).

[0210] Examples of anti-allergy drugs include, but are not limited to, antihistamines, decongestants, corticosteroids, mast cell stabilizers, leukotriene inhibitors, epinephrine shots, azelastine eyedrops (OPTIVAR®), azelastine nasal sprays (ASTELIN®, ASTEPRO®), beclomethasone (QNASL® and QVAR®), betamethasone (DERMABET®, DIPROLENE®), brompheniramine (DIMETANE®), budesonide (RHINOCORT® and PULMICORT FLEXHALER®), carbinoxamine (PALGIC®), cetirizine (ZYRTEC®), ciclesonide (ALVESCO®, ZETONNA®), cyproheptadine, chlorpheniramine (CHLOR-TRIMETON®), clemastine (TAVIST®), cromolyn (CROLOM®), desloratadine (CLARINEX®), desonide (DESONATE®, DESOWEN®), diphenhydramine (BENADRYL®), emedastine eyedrops (EMADINE®), epinastine ophthalmic (ELESTAT®), fexofenadine (ALLEGRA®), fluorometholone (FLAREX®, FML®), fluticasone furoate (FLONASE SENSIMIST®, VERAMYST®), fluticasone propionate (FLONASE ALLERGY RELIEF®), hydrocortisone (CORTAID®, MICORT-HC®), hydroxyzine (ATARAX®, VISTARIL®), ketotifen (ZADITOR®), levocabastine eyedrops (LIVOSTIN®), levocabastine oral (XYZAL®), lodoxamide (ALOMIDE®), loratadine (ALAVERT®, CLARITIN®), loteprednol (ALREX®, LOTEMAX®), methylprednisolone (MEDROL®), mometasone (ASMANEX TWISTHALER®, NASONEX®, ELOCON®), naphazoline and pheniramine combination ophthalmic (OCUHIST®), nedocromil (ALOCRIL®), olopatadine ophthalmic (PATANOL®), oxymetazoline (AFRIN®, DRISTAN®), pemirolast (ALAMAST®), prednisolone (PRELONE®, OMNIPRED®, PRED FORTE®), prednisone (PREDNISONE INTENSOL®, RAYOS®), tetrahydrozoline (TYZINE®) and triamcinolone (NASACORT ALLERGY 24 HOUR®).

[0211] Examples of antiviral drugs include, but are not limited to, ribavirin, interferon (alfacon-1), chloroquine, hydroxychloroquine, EIDD-2801, EIDD-1931, GS-5734, GS-441524, ivermectin, favipiravir, indomethacin, chlorpromazine, penciclovir, nafomostat, nitazoxanide and remdesivir.

### Method of Inducing Chimerism

[0212] A seventh aspect of the present disclosure provides a method of inducing hematopoietic chimerism in a transplant recipient. In some embodiments, the method comprises administering to the recipient an anti-CD154 antibody disclosed herein, and transplanting into the recipient hematopoietic stem cells, thereby inducing hematopoietic chimerism in the recipient. Optionally, a therapeutically effective amount of the anti-CD154 antibody is administered. In some embodiments, the anti-CD154 is administered in a pharmaceutical composition disclosed herein. The anti-CD154 antibody may be administered simultaneously with the transplantation of the hematopoietic stem cells. In some embodiments, the anti-CD154 antibody is administered sequentially with the transplantation of the hematopoietic stem cells. Optionally, the anti-CD154 antibody is administered prior to the transplantation of the hematopoietic stem cells. The anti-CD154 antibody may be administered subsequent to the transplantation of the hematopoietic stem cells. In some embodiments, the anti-CD154 is administered in a single dose. Optionally, the anti-CD154 antibody is administered in multiple doses.

[0213] In some embodiments, the anti-CD154 antibody is administered at a dose of 5-50 mg/kg. The anti-CD154 antibody may be administered at a dose of about 5 to about 50 mg/kg. In some embodiments, the anti-CD154 antibody is administered at a dose of 5-30 mg/kg. The anti-CD154 antibody may be administered at a dose of about 5 to about 30 mg/kg. Optionally, the anti-CD154 antibody is administered at a dose of 5 mg/kg, 10 mg/kg, 15 mg/kg, 20 mg/kg, 25 mg/kg, 30 mg/kg, 35 mg/kg, 40 mg/kg, 45 mg/kg or 50 mg/kg. In some embodiments, the anti-CD154 antibody is administered at a dose of about 5 mg/kg, about 10 mg/kg, about 15 mg/kg, about 20 mg/kg, about 25 mg/kg, about 30 mg/kg, about 35 mg/kg, about 40 mg/kg, about 45 mg/kg or about 50 mg/kg. In some embodiments, the anti-CD154 antibody is administered systemically. The anti-CD154 antibody may be administered subcutaneously, intravenously, intravitreally, orally, via inhalation, transdermally, or rectally. Optionally, the anti-CD154 antibody is administered locally.

[0214] In some embodiments, the transplant recipient is conditioned prior to the transplantation with stem cells. The anti-CD154 antibody may be administered simultaneously with the conditioning step. Optionally, the anti-CD154 antibody is administered sequentially with the conditioning step. In some embodiment, the anti-CD154 antibody is administered prior to the conditioning step. Optionally, the anti-CD154 antibody is administered subsequent to the conditioning step.

[0215] Methods for conditioning the recipient include, but are not limited to, total body irradiation, administration of one or more BCL-2 inhibitors, administration of busulfan, administration of fludarabine phosphate, administration of cyclophosphamide, administration of immunosuppressive one or more T cell-depleting antibodies, administration of cyclosporine A (CsA), administration of FK-506, administration of one or more interleukin-2 (IL-2) receptor inhibitors, administration of IL-15 receptor inhibitors, administration of rapamycin, administration of one or more anti-αβ T cell receptor antibodies, and administration of one or more CD122 antagonists (which block both IL2 and IL15 signaling), administration of kidney donor-derived CD34+ hematopoietic stem cells and CD3+ T-cells (MDR-101 cellular therapy) or a combination thereof. Non-limiting examples of one or more T cell-depleting antibodies include anti-CD4, anti-CD8, anti-CD45, anti-CTLA4, anti-CD20, and anti-CD33 antibodies or a combination thereof. In some embodiments, the transplant recipient has cancer. In some embodiments, the transplant is a bone marrow transplant.

### Method of Inducing Central Tolerance

[0216] An eighth aspect of the present disclosure provides a method of inducing central tolerance in a transplant recipient. In some embodiments, the method comprises administering to the recipient an anti-CD154 antibody disclosed herein, transplanting into the recipient hematopoietic stem cells, and transplanting a donor tissue into the recipient, wherein the transplanted hematopoietic stem cells produce immune cells that are tolerant of the donor tissue, thereby inducing central tolerance in the recipient. Optionally, a therapeutically effective amount of the anti-CD154 antibody is administered. In some embodiments, the anti-CD154 is administered in a pharmaceutical composition disclosed herein. The anti-CD154 antibody may be administered simultaneously with the transplantation of the hematopoietic stem cells. In some embodiments, the anti-CD154 antibody is administered sequentially with the transplantation of the hematopoietic stem cells. Optionally, the anti-CD154 antibody is administered prior to the transplantation of the hematopoietic stem cells. The anti-CD154 antibody may be administered subsequent to the transplantation of the hematopoietic stem cells. In some embodiments, the anti-CD154 is administered in a single dose. Optionally, the anti-CD154 antibody is administered in multiple doses.

[0217] In some embodiments, the anti-CD154 antibody is administered at a dose of 5-50 mg/kg. The anti-CD154 antibody may be administered at a dose of about 5 to about 50 mg/kg. In some embodiments, the anti-CD154 antibody is administered at a dose of 5-30 mg/kg. The anti-CD154 antibody may be administered at a dose of about 5 to about 30 mg/kg. Optionally, the anti-CD154 antibody is administered at a dose of 5 mg/kg, 10 mg/kg, 15 mg/kg, 20 mg/kg, 25 mg/kg, 30 mg/kg, 35 mg/kg, 40 mg/kg, 45 mg/kg or 50 mg/kg. In some embodiments, the anti-CD154 antibody is administered at a dose of about 5 mg/kg, about 10 mg/kg, about 15 mg/kg, about 20 mg/kg, about 25 mg/kg, about 30 mg/kg, about 35 mg/kg, about 40 mg/kg, about 45 mg/kg or about 50 mg/kg. In some embodiments, the anti-CD154 antibody is administered systemically. The anti-CD154 antibody may be administered subcutaneously, intravenously, intravitreally, orally, via inhalation, transdermally, or rectally. Optionally, the anti-CD154 antibody is administered locally.

[0218] In some embodiments, the transplant recipient is conditioned prior to the transplantation with stem cells. The anti-CD154 antibody may be administered simultaneously with the conditioning step. Optionally, the anti-CD154 antibody is administered sequentially with the conditioning step. In some embodiment, the anti-CD154 antibody is administered prior to the conditioning step. Optionally, the anti-CD154 antibody is administered subsequent to the conditioning step.

[0219] Methods for conditioning the recipient include, but are not limited to, total body irradiation, administration of one or more BCL-2 inhibitors, administration of busulfan, administration of fludarabine phosphate, administration of cyclophosphamide, administration of one or more immunosuppressive T cell-depleting antibodies, administration of cyclosporine A (CsA), administration of FK-506, administration of one or more interleukin-2 (IL-2) inhibitors, administration of rapamycin, administration of one or more anti-αβ T cell receptor antibodies, and administration of one or more CD122 antagonists or a combination thereof. Non-limiting examples of one or more T cell-depleting antibodies include anti-CD4, anti-CD8, anti-CD45, anti-CTLA4, anti-CD20, and anti-CD33 antibodies or a combination thereof.

### Method of Preventing Xenotransplant Rejection

[0220] A ninth aspect of the present disclosure provides a method of preventing xenotransplant rejection in a transplant recipient. In some embodiments, the method comprises administering to the subject an effective amount of an anti-CD154 antibody disclosed herein. Optionally, a therapeutically effective amount of the anti-CD154 antibody is administered. In some embodiments, the anti-CD154 is administered in a pharmaceutical composition disclosed herein. The anti-CD154 antibody may be administered simultaneously with the xenotransplant. In some embodiments, the anti-CD154 antibody is administered sequentially with the xenotransplant. Optionally, the anti-CD154 antibody is administered prior to the xenotransplant. The anti-CD154 antibody may be administered subsequent to the xenotransplant. In some embodiments, the anti-CD154 is administered in a single dose. Optionally, the anti-CD154 antibody is administered in multiple doses. Optionally, the anti-CD154 antibody is administered in four doses. Optionally, the anti-CD154 antibody is administered in four doses of 30 mg/kg. Optionally, the anti-CD154 antibody is administered in four doses within two weeks. Optionally, the first dose of anti-CD154 antibody is administered in two times, a first half dose before the graft is revascularized and a second half dose once it is confirmed that the xenotransplant procedure has been successful.

[0221] The anti-CD154 antibody may be administered at a dose of 5-50 mg/kg. In some embodiments, the anti-CD154 antibody is administered at a dose of about 5 to about 50 mg/kg. The anti-CD154 antibody may be administered at a dose of 5-30 mg/kg. In some embodiments, the anti-CD154 antibody is administered at a dose of about 5 to about 30 mg/kg. Optionally, the anti-CD154 antibody is administered at a dose of 5 mg/kg, 10 mg/kg, 15 mg/kg, 20 mg/kg, 25 mg/kg, 30 mg/kg, 35 mg/kg, 40 mg/kg, 45 mg/kg or 50 mg/kg. In some embodiments, the anti-CD154 antibody is administered at a dose of about 5 mg/kg, about 10 mg/kg, about 15 mg/kg, about 20 mg/kg, about 25 mg/kg, about 30 mg/kg, about 35 mg/kg, about 40 mg/kg, about 45 mg/kg or about 50 mg/kg. In some embodiments, the anti-CD154 antibody is administered systemically. The anti-CD154 antibody may be administered subcutaneously, intravenously, intravitreally, orally, via inhalation, transdermally, or rectally. Optionally, the anti-CD154 antibody is administered locally.

[0222] The transplant recipient may be human, and the xenotransplant may be from a non-human donor. In some embodiments, the non-human donor is selected from a group consisting of a pig, a mini-swine, and a non-human primate. Optionally, the non-human donor is a pig or mini-swine that has been engineered to decrease or eliminate expression of one or more genes. In some embodiments, the one or more decreased or eliminated genes include, but are not limited to, porcine endogenous retroviruses (PERV), α-1,3-galactosyltransferase (GGTA1), cytidine monophosphate-N-acetylneuraminic acid hydroxylase (CMAH), β1,4-N-acetylgalactosaminyltransferase (β4GalNT2), and MHC class I. Optionally, the one or more decreased or eliminated genes comprise PERV. The PERV may be PERV A, a PERV B, or a PERV C. The expression of all PERV genes may be eliminated in the pig or mini-swine. The expression of the one or more genes may be decreased or eliminated using CRISPR/Cas9 gene editing.

[0223] In some embodiments, the non-human donor may be engineered to express one or more human proteins. Examples of one or more human proteins include, but are not limited to, complement regulatory protein, human α-galactosidase, a coagulation regulatory protein, a human anti-inflammatory protein, and human CTLA-4-Ig or a combination thereof. The one or more human proteins may be expressed in all tissues of the non-human donor. In some embodiments, the one or more human proteins are expressed in a tissue-specific manner in the non-human donor. Examples of complement regulatory protein include, but are not limited to, human decay-accelerating factor (CD55), membrane cofactor protein (CD46) and CD59. Examples of coagulation regulatory proteins include, but are not limited to, thrombomodulin, endothelial protein C receptor, tissue factor pathway inhibitor, CD39, and CD73. Examples of human anti-inflammatory proteins include, but are not limited to, hemeoxygenase-1 (HO-1) and A20.

[0224] The xenotransplant rejection may be associated with a solid organ transplant selected from the group consisting of a heart transplant, a kidney transplant, a liver transplant, a lung transplant, a pancreas transplant, a kidney-pancreas transplant, a heart-lung transplant, kidney-heart transplant, a kidney-heart-pancreas transplant, a heart-liver transplant, a heart-liver-kidney transplant, a heart-lung-kidney transplant, a heart-lung-liver transplant, a lung-kidney transplant, a lung-liver transplant, a liver-intestines-pancreas transplant, an intestines-pancreas transplant, a liver-kidney-intestines-pancreas transplant, and a kidney-intestines transplant.

### EXAMPLES

[0225] The following examples are offered for illustrative purposes only and do not limit the scope of the present disclosure or paragraphs in any way. Indeed, various modifications of the disclosure in addition to those shown and described herein will become apparent to those skilled in the art from the foregoing description and fall within the scope of the paragraphs. The following examples and preparations use the abbreviations: “MSX” for Methionine Sulphoximine, “RU” for ratio unit; “FACS” for Fluorescence Activated Cell Sorting “MW” for molecular weight; “His-Tag” for C-terminal polyhistidine (6×His) (SEQ ID NO: 331) tag for rapid purification with nickel-chelating resin and detection with an anti-His (C-term) antibody; “BSA” for bovine serum albumin; “EDTA” for ethylenediaminetetraacetic acid; “DMSO” for dimethyl sulfoxide; “MOPS” for 3-(N-morpholino) propanesulfonic acid; “MES” for 2-(N-Morpholino)ethanesulfonic acid; “PBS” for phosphate buffered saline; “dPBS” for Dulbecco's phosphate buffered saline; “HEMA” for 2-hydroxy-ethyl methacrylate; “DMEM” for Dulbecco's modified eagle's medium; “FBS” for fetal bovine serum; “NEAA” for non-essential amino acids; “HEPES” for N-2-hydroxyethylpiperazine-N′-2-ethanesulfonic acid; and “DMF” for dimethyl formamide.

### Example 1. Generation of CHO Stable Pools Expressing Anti-CD154 Monoclonal Antibody

[0226] DNA molecules encoding the sequences for the TNX01-TNX05 anti-CD154 antibodies with various Fc domains (SEQ ID NOs: 175-178 and 194) were codon optimized for CHO cells with internal EcoR1 and BamH1 removed and synthesized by one of two vendors: GeneScript (GS) and ATUM (AT). SEQ ID NO: 228 (5′-GAATTCGGCCGGCCACC) and SEQ ID NO: 229 (3′-TAATGAACGCGTGGATCC) were included in the final sequences as EcoRI and BamH1 restriction sites respectively. The DNA molecules were cloned into the pTT109™ (National Research Council, Canada) plasmid using EcoR1 and BamH1 and stably transfected into CHO55E1™ cells (National Research Council, Canada). 100 μg industrial grade plasmid in ddH2O was prepared for all five constructs. Stable pools were generated using 50 μM of MSX as a selection agent. The stable pool generation using 50 μM MSX was performed in duplicate. Stable pools were generated in 6 extra-deep well plates, fed-bath production with Feed 4 (FUJIFILM IRVINE SCIENTIFIC®). Stable pools were then generated in small scale 100 ml volumes in shake flasks with Feed 12.7 (FUJIFILM IRVINE SCIENTIFIC®). FIG. 1 summarizes the titer and availability of the five stable pools of CHO cells expressing anti-CD154 mAb in 100 mL fed-batch production. Table 1 summarizes the anti-CD154 mAb (TNX01-05; light chain comprising SEQ ID NO: 196; heavy chain comprising SEQ ID NOs: 147-150 and 165, respectively) production from the supernatant of stably transfected CHO cells as a starting material. A similar process was used to generate TNX06-TNX13 anti-CD154 antibodies with various Fc domains (SEQ ID NOs. 316-319 and 293-296). Table 2 summarizes the anti-CD154 mAb (TNX06-13; light chain comprising SEQ ID NO: 196; heavy chain comprising SEQ ID NOs: 166, 234, 284, 285, 159, 160, 281 and 282, respectively) production from the supernatant of stably transfected CHO cells as a starting material.

TABLE 1
Antibody Production from Stable CHO Cells (100 mL Fed-Batch Production)

| | | Titer, pA- | Harvest | Total | Quantity in 50 |
|---|---|---|---|---|---|
| Pool | | HPLC | Volume | amount | mL supernatant |
| Name | Fc Domain | (mg/L) | (mL) | (mg) | (mg) |
| TNX01 | SEQ ID NO: 1 | 603 | 100 | 60.3 | 30.15 |
| TNX02 | SEQ ID NO: 2 | 861 | 100 | 86.1 | 43.05 |
| TNX03 | SEQ ID NO: 3 | 615 | 100 | 61.5 | 30.75 |
| TNX04 | SEQ ID NO: 4 | 659 | 100 | 65.9 | 32.95 |
| TNX05 | SEQ ID NO: | 354 | 100 | 35.4 | *24.78 |
| | 14 | | | | (*70 mL) |

TABLE 2
Antibody Production from Stable CHO Cells (100 mL Fed-Batch Production)

| | | Titer, | | | |
|---|---|---|---|---|---|
| | | pA- | Harvest | Total | |
| Pool | | HPLC | Volume | amount | Volume (mL) |
| Name | Fc Domain | (mg/L) | (mL) | (mg) | (~30 mg) |
| TNX06 | SEQ ID NO: 17 | 496 | 132 | 65 | 61 |
| TNX07 | SEQ ID NO: 236 | 463 | 131 | 61 | 65 |
| TNX08 | SEQ ID NO: 240 | 538 | 132 | 71 | 56 |
| TNX09 | SEQ ID NO: 241 | 523 | 131 | 69 | 57 |
| TNX10 | SEQ ID NO: 6 | 595 | 131 | 78 | 50 |
| TNX11 | SEQ ID NO: 4 | 643 | 131 | 84 | 47 |
| TNX12 | SEQ ID NO: 4 | 630 | 131 | 82 | 48 |
| TNX13 | SEQ ID NO: 4 | 639 | 131 | 84 | 47 |

### Example 2. Purification of Anti-CD154 Monoclonal Antibody

[0227] The anti-CD154 monoclonal antibodies (TNX01-TNX13) from Example 1 were purified by Protein A Affinity Purification using 4×1 mL. HiTrap MabSelect SuRe columns. The following steps were performed according to the manufacturer's instructions. (1) Equilibration/Wash was conducted using DPBS; (2) 4×10 mL of the samples were loaded at a linear flow rate for binding set at approximately 45 cm/h (0.3 mL/min) to get a residence time of approximately 3.3 minutes; (3) Elution was conducted using 0. M Citrate at a pH of 3.0; (4) Neutralization was conducted using 10% (v/v) M HEPES Buffer. The samples were buffer exchanged in DPBS using 5 mL Zeba Spin desalting columns (ThermoFisher Scientific, Waltham Mass.) and aseptically filtered on 0.22 μm. No precipitation was observed during elution or neutralization. Table 3 below summarizes the antibody characteristics obtained after Protein A purification and desalting, and the yields of the thirteen purified anti-CD154 monoclonal antibodies samples obtained from the CHO55E1 stable pools. Note that TNX04 and TNX05 required further purification using preparative size exclusion chromatography (prep-SEC) to remove aggregates.

TABLE 3
Antibody Recovery Following Purification

| Sample | | Quantity | Concentration | Volume | % Monomer |
|---|---|---|---|---|---|
| ID/Lot# | Fc Domain | (mg) | (mg/mL) | (mL) | (UPLC-SEC) |
| TNX01 | SEQ ID NO: 1 | 22.84 | 11.77 | 1.94 | 98.3 |
| TNX02 | SEQ ID NO: 2 | 29.38 | 15.22 | 1.93 | 99.1 |
| TNX03 | SEQ ID NO: 3 | 20.79 | 11.49 | 1.81 | 98.3 |
| TNX04 | SEQ ID NO: 4 | 19.04 | 1.63 | 11.68 | 99.0 |
| TNX05 | SEQ ID NO: 14 | 14.54 | 1.23 | 11.8 | 99.8 |
| TNX06 | SEQ ID NO: 17 | 21.28 | 13.30 | 1.60 | 98.15 |
| TNX07 | SEQ ID NO: 236 | 22.31 | 13.86 | 1.61 | 94.61 |
| TNX08 | SEQ ID NO: 240 | 20.34 | 13.30 | 1.53 | 95.92 |
| TNX09 | SEQ ID NO: 241 | 21.52 | 13.79 | 1.56 | 94.82 |
| TNX10 | SEQ ID NO: 6 | 21.88 | 13.76 | 1.59 | 97.72 |
| TNX11 | SEQ ID NO: 4 | 21.52 | 13.45 | 1.60 | 97.24 |
| TNX12 | SEQ ID NO: 4 | 23.22 | 14.79 | 1.57 | 97.44 |
| TNX13 | SEQ ID NO: 4 | 19.01 | 12.34 | 1.54 | 97.62 |

[0228] The samples were analyzed by SDS PAGE during each step of the purification process using Sypro Ruby stained gel under non-reducing conditions. Samples were also analyzed once the final product was obtained. As shown in FIG. 2, under non-reducing condition, the mAbs TNX01-TNX05 were estimated to have a molecular weight of 160-170 kDa, except for TNX04 which exists as a free heavy chain (HC) and free light chain (LC). In TNX04, the heavy and light chains run separately in a denaturing SDS-PAGE, under non-reducing conditions, given that the cysteines that form the di-sulfide bonds (C220, C226, and C229) are mutated. UPLC-SEC results suggest that the non-covalent interactions form an intact mAb under physiological conditions. Lower molecular weight (LMW) bands are likely due to artefactual fragmentation of mAbs during SDS-PAGE samples preparation. As shown in FIG. 10, the mAbs TNX06-TNX13 were estimated to have a molecular weight of 160-170 kDa, except for TNX11 which behaves as a half antibody and presumably forms a non-covalent 2HC-2LC structure.

[0229] The final products were also analyzed using size-exclusion ultra-performance liquid chromatography (UPLC-SEC) according to the manufacturer's instructions.

Results: These results demonstrate that highly pure samples of the anti-CD154 antibodies of the disclosure were obtained.

### Example 3. Determination of Anti-CD154 Monoclonal Antibody Binding to CD40L by Surface Plasmon Resonance (SPR) Using BIACORE®

[0230] The binding of the purified anti-CD154 antibodies from Example 2 to CD40L was measured by surface plasmon resonance using the BIACORE® T200 instrument and a sensorchip CM-5 according to the manufacturer's instructions.

[0231] Specifically, commercial CD40L (SINO BIOLOGICAL® Cat #LC12AP2301) was injected over anti-CD154 antibody pools (TNX01-05) captured onto a Protein A surface (2,000 Rus; Cat #Z02201 GENSCRIPT®, Piscataway, N.J.), using PBST pH 7.4 (PBS with 0.05% Tween 20) as the running buffer. The SPR antibody capture surface was prepared using Protein A (Cat #Z02201 GENSCRIPT®, Piscataway, N.J.), 2000 Rus. The ligand was 1.25-2.5 μg/mL mAb (TNX01-TNX05) captured for 10s at a flow of 10 μL/min to generate approximately 50 RU antibody surfaces. The analyte was CD40L (SINO BIOLOGICAL® 10239-H08E) resuspended according to manufacturer's recommendations. Single cycle kinetics were conducted with 4 concentrations (6.0/1.5/0.38/nM 3-fold dilution, Flow 75 μL/min, s association, 1800s dissociation. The regeneration was conducted with 1×60s 10 mM glycine pH 1.5, flow 30 μL/min.

[0232] The raw data (n=3) were processed using the BIACORE® T200 Evaluation software. FIG. 3 provides representative CD40L sensorgrams for TNX01-TNX05 and demonstrated a 1:1 binding model. As CD40L is a trimer, the sensorgrams deviated somewhat from ideal binding behavior due to the possibility of avid binding (multiple binding sites) by the trimer antigen. All of the fits should be considered “apparent” K_{D} values because the sensorgrams were deviating from 1:1 binding behavior. CD40L binding is based on the calculated fit of the sensorgrams.

[0233] FIG. 4 summarizes the data generated from the SPR analysis and the calculated apparent K_{D} values (affinity; ratio of kd to ka). TNX05 did not to bind to the protein A surface as efficiently as TNX01-TNX04. This weaker binding may represent a smaller component of avidity in these sensorgrams. A lower surface density indicates that the TNX05 molecules are further apart which could equate to fewer sCD40L molecules engaging multiple antibody paratopes at any one time. TNX01-TNX05 were comparable in terms of K_{D} and approached the lower limit of affinity measurement for the instrument platform in terms of the measured on-rate.

[0234] For TNX06-TNX13, the sensorgrams were generated using the BIACORE®T200 Evaluation software and compared using the sensorgram comparability approach. This method is a statistical comparison of sensorgram shape only, independent of kinetic analysis, developed by GEHealthcare for the Biacore T200 platform. An average 3SD window of variation in the sensorgram scatter is generated for one batch as a reference (TNX02), which was then compared pairwise to the other variants. Each pairwise comparison was assessed a similarity score based on the number of points inside the window of variation, and distance of points outside the reference window. Using this method, all of the samples were compared to the TNX02 scatter window collected in triplicate. All of the variants (TNX06-TNX13) tested showed approximately 80% similarity to the TNX02 sensorgrams for sCD40L binding with no obvious large deviations in the on- or off-rate, which indicates they are all binding in a similar manner. See FIG. 11.

Results: These results demonstrate that each of the anti-CD154 antibodies of the disclosure bind to CD40L. TNX01-TNX04 (purified anti-CD154 antibodies) bind to CD40L with an affinity of about 10 pM binding (see FIG. 4). TNX05 had slightly weaker binding, at around 20 pM (see FIG. 4). TNX06-13 are approximately 80% similar to TNX02 in the manner in which they bind to CD40L with no obvious large deviations.

### Example 4. Determination of Anti-CD154 Monoclonal Antibody Binding to FcγRIA by Surface Plasmon Resonance (SPR) Using BIACORE®

[0235] The binding of the purified anti-CD154 antibodies from Example 2 to high affinity FcγRIA (CD64) was measured by surface plasmon resonance (SPR) using the BIACORE® T200 instrument and a sensorchip CM-5 according to the manufacturer's instructions.

[0236] Specifically, FcγRIA was injected over anti-CD154 antibody pools immobilized onto a Protein A surface (2,000 Rus; Cat #Z02201 GENSCRIPT®, Piscataway, N.J.), using PBST pH 7.4 (PBS with 0.05% Tween 20) as the running buffer. The ligand was 1.25-2.5 μg/mL mAb (TNX01-TNX05) captured for 10s at a flow of 10 μL/min to generate approximately 250-400 RUs antibody surfaces. The analyte FcγRIA (CD64; National Research Council, Canada) was resuspended in PBST containing 3.4 mM EDTA and 0.05% Tween20 and used at a concentration range of 300 to 0.14 nM, at a flow rate of 100 μL/min, 90s association time, 1,200s dissociation time. The regeneration was conducted with 1×60s 10 mM glycine pH 1.5, flow 30 μL/min.

[0237] The raw data (n=3) were processed using the BIACORE®T200 Evaluation software. FIG. 5 provides representative FcγRIA sensorgrams for TNX01-TNX05 and demonstrates a 1:1 binding model.

[0238] FIG. 6 summarizes the data generated from the SPR analysis and the calculated apparent K_{D} values (affinity; ratio of kd to ka) for TNX01-05. Due to the high affinity of the ligand CD64 (TNX02 K_{D}˜30 pM), accurate K_{D} values could be determined for all of the loss-of-function variants. TNX04 showed an 11-fold loss of activity followed by TNX05 with a 300-fold loss. Both TNX01 and TNX03 had a 3000-fold loss of activity (fast-on and -off), which necessitated a steady-state end-point analysis rather than kinetic analysis.

[0239] FIGS. 12a-12c summarize the data generated from the SPR analysis and the calculated apparent K_{D} values (affinity; ratio of kd to ka) for TNX06-13 binding to FcγRIA. TNX06 to TNX13 were all successfully assayed for binding to FcgRIa. Due to the high affinity of the ligand CD64 (TNX02 K_{D}˜40 pM), accurate K_{D} values could be determined for all of the loss-of-function variants. TNX06, 07, 11, 12 and 13 showed between 6-12-fold weaker binding than TNX02. TNX08, 09 and 10 had 2600, 3800 and 1800-fold weaker binding, respectively, (fast-on and -off).

Results: These results demonstrate that, as desired, the anti-CD154 antibodies of the disclosure demonstrate reduced binding to FcγRIA.

### Example 5. Determination of Anti-CD154 Monoclonal Antibody Binding to Low-Affinity FcγR by Surface Plasmon Resonance (SPR) Using BIACORE®

[0240] The binding of the purified anti-CD154 antibodies from Example 2 to a low affinity FcγR panel (CD16aF, CD16aV, CD32aH, CD32bF) was measured by surface plasmon resonance (SPR) using the BIACORE® T200 instrument and a sensorchip CM-5 according to the manufacturer's instructions. This low affinity FcγR panel of antigens represents most common allotypes of the different receptors that have been used to assess the effector function of antibodies of interest. See e.g., Geuijen et al., FEBS Open Bio 7 (2017) 1557-1574 (2017); Hanson and Barb, Biochemistry, 54, 2931-2942 (2015); Smith and Clatworthy Nature Reviews Immunol (10):328-344 (2010); Weiner et al., Nature Reviews Immunol (10):317-327 (2010).

[0241] Specifically, antigens in an FcγR panel (CD16aF, CD16aV, CD32aH, CD32bF) were each injected over anti-CD154 antibody pools (TNX01-TNX05) onto a Protein A surface (2,000 Rus; Cat #Z02201 GENSCRIPT®, Piscataway, N.J.), using PBST pH 7.4 (PBS with 0.05% Tween 20) as the running buffer. The ligand was 1.25-2.5 μg/mL mAb (TNX01-TNX05) captured for 10s at a flow of 10 μL/min to generate approximately 200-500 RUs antibody surfaces (surface dependent). The analytes were antigens in the FcγR panel (CD16aF, CD16aV, CD32aH, CD32bF; National Research Council, Canada), which were resuspended in PBST containing 3.4 mM EDTA and 0.05% Tween20. Single cycle kinetics were conducted at concentration ranging from 12 μM to 0.062 μM, Flow rate 25 μL/min, 15s association (CD32aH and CD32bF) and 40 s association (CD16aF and CD16aV), dissociation time 120s. The regeneration was conducted with 1×60s 10 mM glycine pH 1.5, flow 30 μL/min (SPR data not shown). Thus, TNX01-TNX05 were assayed for binding to the National Research Council Canada, Human Health Therapeutics Research Centre low-affinity FcγR panel (CD16aF, CD16aV, CD32aH, CD32bF) by measuring steady-state affinity.

[0242] FIG. 7 summarizes the data generated from the SPR analysis and the calculated apparent K_{D} values (affinity; ratio of kd to ka) for TNX01-05. In particular, TNX02 displayed the expected wild-type binding, with the other variants showing significantly reduced binding. In particular, TNX01 and TNX03 demonstrated almost no binding activity at the FcγR concentrations tested. TNX05 showed ˜5- to 20-fold loss of binding to the various receptors. TNX04 showed 20- to 60-fold loss of binding to CD16aV, CD32aH, CD32bF and undetectable binding to CD16aF (FcγRIIIaF).

[0243] FIGS. 13a-13b summarize the data generated from the SPR analysis and the calculated apparent K_{D} values (affinity; ratio of kd to ka) for TNX06-13 binding to low-affinity FcγR. TNX02 displayed the expected wild-type binding, with the other variants showing significant losses of function. In particular, TNX11, showed almost no binding activity at the FcγR concentrations tested to any members of the low-affinity FcγR panel. TNX06 and 07 showed ˜2 to 10-fold loss of activity against the various low-affinity receptors. TNX08 showed 2 to 17-fold loss of activity against the various low-affinity receptors. TNX09 and 10 showed undetectable activity against all low-affinity receptors except CD16aV (FcγRIIIaV) to which they both had ˜12-fold loss. TNX12 showed undetectable activity against all low-affinity receptors except CD32bF (FcγRIIbF) for which it had an 8-fold loss. TNX13 showed undetectable activity against both CD16aV (FcγRIIIaV) and CD16aF (FcγRIIIaF) and had 6 and 17-fold loss of binding activity against CD32bF (FcγRIIbF) and CD32aH (FcγRIIaH), respectively.

Results: These results demonstrate that the anti-CD154 antibodies of the disclosure do not bind or demonstrate reduced binding to various FcγR low-affinity receptors.

### Example 6. Anti-CD154 Monoclonal Antibodies Binding in Jurkat D1.1 and Jurkat Cells

[0244] The binding of the purified anti-CD154 antibodies from Example 2 to Jurkat D1.1 cells (CD40L positive) and Jurkat cells (CD40L negative) was evaluated. Yellin, M J, et al; J. Immunol. 147:3389-3395 (1991); Lederman, S, et al. J. Exp. Med. 175:1091-1101 (1992); U.S. Pat. No. 6,331,433. High-throughput FACS cell-binding assays were conducted using the test antibodies (TNX01-TNX05), and a control antibody (mouse anti-human CD40L from (R&D MAB617)). SYNAGIS® was used as a human IgG1 isotype negative control antibody. The detection reagents were AF488 F(ab′)₂ donkey anti-human IgG, Fcγ fragment specific (Jackson ImmunoResearch, Westgrove, Pa.), and goat anti-mouse IgG, Fcγ fragment specific (Jackson ImmunoResearch, Westgrove, Pa.). Briefly, 105 Jurkat or D1.1 cells were incubated for 2 hours at 4° C. with 0-200 nM primary antibody, and 1 hour at 4° C. with the secondary detection antibody followed by viability staining with propidium iodide (1% solution). Flow cytometric acquisition of signals in samples were performed the same day in a LSR FORTESSA™ (BD Biosciences). The cells were washed and the AlexaFluor488 fluorescence was measured using the 488 nm laser as an excitation source and the 530/30 nm band pass filter. The median fluorescence intensity (MFI) was determined for 5000 alive, single cells per sample. The FACS cell-binding assays were similarly conducted for the test antibodies TNX06-TNX13.

[0245] As shown in FIG. 8(a), the anti-CD154 antibodies (TNX01-TNX05) all bind with high affinity to D1.1 cells, whereas the negative control antibody (SYNAGIS®) had no detectable binding to D1.1 cells. The K_{D} values were calculated using the specific binding parameter with hill slope fit. In contrast to FIG. 8(a), FIG. 8(b) demonstrates that all of the anti-CD154 antibodies and the negative control antibody (SYNAGIS®) failed to bind to Jurkat cells, which do not express CD40L on their surfaces. As shown in FIG. 14(a), the anti-CD154 antibodies (TNX06-TNX13) all bind with high affinity to D1.1 cells, whereas the negative control antibody (SYNAGIS®) had no detectable binding to D1.1 cells. The K_{D} values were calculated using the specific binding parameter with hill slope fit. Results: These results demonstrate that the purified anti-CD154 antibodies of the disclosure bind to CD40L-expressing D1.1 cells with high affinity.

### Example 7. Anti-CD154 Monoclonal Antibodies Platelet Activation Study

[0246] The ability of purified anti-CD154 antibodies from Example 2 to activate platelets is evaluated. CD40L (CD154) is a strong activator of nuclear factor kappa B (NF-κB) in platelets that primes and enhances platelet activation in response to thrombotic stimuli. Further, binding of the Fc domain of anti-CD40L mAbs (such as hu5c8) to the activating FcgRIIa (CD32a) receptor on platelets results in activation and aggregation of platelets. Kojok K et. al.; J Am Heart Assoc. 7:e009636 (2018); Shock et al., Arthritis Res Ther. September 3; 17:234 (2015); Xie et al., The Journal of Immunology, 192: 4083-4092 (2014).

[0247] Blood samples from healthy human blood donors, 18 years or older, is collected in sterile vacuum blood collection tubes (yellow top BD Vacutainer B364606, Canada), mixed gently four times by inversion, and tested within 60 mins. A portion of the blood is pre-treated with anti-CD32a (FcgRIIa) antibody and incubated at room temperature (RT) for 30 min. A portion of untreated blood (i.e., no incubation with an anti-CD32a antibody) from each donor is also tested. The test conditions include: (1) soluble recombinant human CD40L (sCD40L) alone; (2) sCD40L complexed to human IgG1 anti-CD40L; (3) a direct platelet agonist adenosine 5′-diphosphate sodium salt; along with detection antibodies to platelet phenotyping cell surface markers CD41a and CD61, and the platelet activation markers P-selectin (CD62P) and activated GPIIb/IIIa (PAC1). IC ratios of the HuIgG1 anti-CD40L: sCD40L of 1:1, 1:2, 1:3.5, 1:4, 1:5 and 1:6 are tested for activating platelets. To determine absolute counts of each cell type, 50 μL of 123count eBeads (Invitrogen, NJ) are added to the wells. All the conditions are tested in triplicates. Platelets are analyzed for activation by flow cytometry.

[0248] Table 4 below summarizes the final concentrations of the molecules used in the platelet assay:

| | | Final concentration |
|---|---|---|
| Molecule | Description | used |
| Media | Basal control | |
| Excipient | PBS | |
| TI 1 (sCD40L) | sCD40L, tested alone at 10 | 10 μg/mL, 20 μg/mL, |
| | μg/mL and in IC | 35 μg/mL, 40 μg/mL, |
| | | 50 μg/mL and 60 |
| | | μg/mL |
| TI 2 Hu IgG1 anti- | anti-CD40L (hu5c8-IgG1) | 10 μg/mL |
| CD40L (hu5c8-IgGl) | (Absolute antibody | |
| | Cedarlane, Canada) | |
| TI 3 Mouse IgG1 anti- | Mouse IgG1 anti-Hu | 10 μg/mL |
| Hu CD40L | CD40L | |
| ADP | Adenosine 5′-diphosphate | 10 μg/mL ≈ 22 μM |
| | sodium salt, Positive | |
| | control | |
| Hu IgG1 anti-CD40L | Fc domain containing key | 10 μg/mL |
| with reduced FcR | point mutations that | |
| binding (TNX01- | decrease/abrogate binding | |
| TNX13) | to Fc gamma receptors | |

[0249] Once stained and fixed, the samples are acquired on Cytoflex flow cytometer using Cytexpert version 1.2 software (Beckman Coulter, MN) and analyzed using FlowJo version 10.1 software (FlowJo LLC, OR). Platelet cells are defined based on the forward scatter (FSC; an indication of size) and side scatter (SSC; an indication of granularity) profile. Further, the activated and non-activated status of platelets identified based on gating are recorded. Absolute Count using 123count eBeads is calculated using the following formula: (cells/μL)=(Cell count/eBead Count)×eBead Concentration.

[0250] From the recorded data, all of the wells from the same sample are grouped, averaged and the standard deviation as well as the % Coefficient of Variation (CV) is calculated between replicates using LibreOffice™ Calc software. From the Calc files generated, tables including the percentage of each cell population are generated.

[0251] Next, the fold induction over control is computed for each treatment group in the platelet assay conducted at the optimal molar ratio for each test antibody:sCD40L. Fold induction over control is the ratio of median fluorescence intensity (MFI) of each treatment group for each parameter (CD62P or PAC-1) over MFI of the control blood group. The anti-CD32a antibody, which selectively blocks 5c8-IgG1/sCD40L IC-induced platelet activation, is expected to show no effect on platelet activation induced by ADP, a direct platelet agonist. 5c8-IgG1 (the positive control) is expected to show platelet activation. The test antibodies of the present disclosure (TNX01-TNX13) are expected to show diminished or no activity in the platelet activation assay.

[0252] Results: These results are expected to demonstrate that the purified anti-CD154 antibodies of the disclosure have a diminished ability to activate or aggregate platelets unlike the positive control hu5c8-IgG1.

### Example 8. Anti-CD154 Monoclonal Antibodies for the Treatment of Heart Transplant Rejection

[0253] A heterotopic heart transplantation was performed in a Cynomolgus macaque monkey. The heart was transplanted into the abdomen and connected to descending aortic artery and vena cava. Anti-CD154 antibody TNX05 (hu5c8 mutated-IgG4 (IgG4 S228P/L235A)) was administered intravenously to the monkey. The monkey was administered a 30 mg/kg dose four times within the first two weeks. Half of the first dose of the Anti-CD154 antibody TNX05 was given before the graft was revascularized and the other half when it was confirmed that the procedure was successful. After the first two weeks, the monkey was administered a 10 mg/kg dose once a week for four weeks. Then, the monkey was administered 20 mg/kg once every four weeks. The dose on Day 84 was reduced from 20 mg/kg to 15 mg/kg.

[0254] Blood was collected at days 70, 77 and 84 and a Complete Blood Count was performed. All the parameters tested were within normal ranges, as seen in Table 5 below for the 30 mg/kg dose monkey. The monkey's transplanted heart was strongly beating through palpation, and contractility was also maintained, as observed by Ultrasound. No sign of rejection of the transplanted heart was detected through Day 84. No signs of thrombosis or thromboembolic events were detected through Day 84.

TABLE 5

| Normal | | | | |
|---|---|---|---|---|
| Ranges | Parameter* | Day 70 | Day 77 | Day 84 |
| 6.9-14.5 | WBC | 7.2 | 11 | 5.6 |
| 4.4-7.0 | LYM | 3.4 | 4 | 2.1 |
| 0.0-0.2 | MONO | 0.6 | 1.1 | 0.6 |
| 3.3-6.3 | GRAN | 3.2 | 5.9 | 2.9 |
| | LYM % | 47.9 | 36.9 | 37.9 |
| | MONO % | 7.3 | 9.6 | 8.8 |
| | GRAN % | 44.8 | 53.5 | 53.3 |
| 40.7-47.3 | HCT | 36.1 | 38.1 | 38.3 |
| 72.3-83.7 | MCV | 67.5 | 68.1 | 66.9 |
| 0.0-99.9 | RDWa | 56.6 | 54.4 | 53.2 |
| 0.0-99.9 | RDW % | 20.1 | 19.2 | 19 |
| 12.8-15.0 | HGB | 11.8 | 12.2 | 12.4 |
| 31.1-32.9 | MCHC | 32.8 | 32 | 32.6 |
| 23.1-26.9 | MCH | 22.1 | 21.8 | 21.8 |
| 5.10-6.30 | RBC | 5.35 | 5.59 | 5.72 |
| 302-734 | PLT | 236 | 129 | 201 |
| 0.0-99.9 | MPV | 8.5 | 8.9 | 9.2 |

*WBC: white blood cell;
LYM: Lymphocytes (%: percentage of total cells);
MONO: Monocytes (%: percentage of total cells);
GRAN: Granulocytes (%: percentage of total cells);
HCT: Hematocrit;
MCV: Mean corpuscular volume;
RDW: Red cell distribution width (a: absolute value and % percentage);
HGB: Hemoglobin;
MCHC: Mean corpuscular hemoglobin concentration;
MCH: Mean corpuscular hemoglobin;
RBC: Red blood cell count;
PLT: Platelet count;
MPV: Mean platelet volume.

[0255] A biopsy was performed on day 91. Two days after the biopsy, a telemetry device showed decreasing heart graft function. An ultrasound demonstrated that graft contractility was reduced. An exploration of the abdomen confirmed that the graft was beating weakly. The graft was removed, and the monkey was euthanized.

[0256] An autopsy did not show any evidence of thromboembolism outside of the heart graft, where fresh thrombus confined to the ventricular cavities was found, as expected after a graft stops beating, and blood in the heart becomes static. The lungs had no infarcts, and the brain and intestine were entirely normal. Those are sites where thrombi were mainly observed following administration with prior art antibodies. The graft anastomoses were widely open and without any clots.

[0257] Results: These results demonstrate that the antibodies of the invention are capable of preventing transplant rejection, while avoiding the problems with thrombosis caused by prior art antibodies.

TABLE 6
Sequences of humanized anti-CD154 antibodies.

| | | |
|---|---|---|
| SEQ ID | Description | Sequences |

Fc (CH2-CH3) WITH AND WITHOUT TERMINAL LYSINE AND WITH/WITHOUT HINGE
Fc domain, no terminal lysine

| | | |
|---|---|---|
| 1 | TNX01 IgG1 Fc | APELLGGPSVFLFPPKPKDTLMISRTPEVTCVVVDVSHEDPEVKFNWYV |
| | (N297Q) | DGVEVHNAKTKPREEQYQSTYRVVSVLTVLHQDWLNGKEYKCKVSNKAL |
| | | PAPIEKTISKAKGQPREPQVYTLPPSRDELTKNQVSLTCLVKGFYPSDI |
| | | AVEWESNGQPENNYKTTPPVLDSDGSFFLYSKLTVDKSRWQQGNVFSCS |
| | | VMHEALHNHYTQKSLSLSPG |
| 2 | TNX02 IgG1 Fc | APELLGGPSVFLFPPKPKDTLMISRTPEVTCVVVDVSHEDPEVKFNWYV |
| | (wildtype) | DGVEVHNAKTKPREEQYNSTYRVVSVLTVLHQDWLNGKEYKCKVSNKAL |
| | | PAPIEKTISKAKGQPREPQVYTLPPSRDELTKNQVSLTCLVKGFYPSDI |
| | | AVEWESNGQPENNYKTTPPVLDSDGSFFLYSKLTVDKSRWQQGNVFSCS |
| | | VMHEALHNHYTQKSLSLSPG |
| 3 | TNX03 IgG1 Fc | APELLGGPSVFLFPPKPKDTLMISRTPEVTCVVVDVSHEDPEVKFNWYV |
| | (N297G) | DGVEVHNAKTKPREEQYGSTYRVVSVLTVLHQDWLNGKEYKCKVSNKAL |
| | | PAPIEKTISKAKGQPREPQVYTLPPSRDELTKNQVSLTCLVKGFYPSDI |
| | | AVEWESNGQPENNYKTTPPVLDSDGSFFLYSKLTVDKSRWQQGNVFSCS |
| | | VMHEALHNHYTQKSLSLSPG |
| 4 | TNX04 TNX11 | APELLGGSSVFLFPPKPKDTLMISRTPEVTCVVVDVSHEDPEVKFNWYV |
| | TNX12 TNX13 | DGVEVHNAKTKPREEQYNSTYRVVSVLTVLHQDWLNGKEYKCKVSNKAL |
| | IgG1 Fc | PAPIEKTISKAKGQPREPQVYTLPPSRDELTKNQVSLTCLVKGFYPSDI |
| | (P238S) | AVEWESNGQPENNYKTTPPVLDSDGSFFLYSKLTVDKSRWQQGNVFSCS |
| | | VMHEALHNHYTQKSLSLSPG |
| 5 | TNX05 TNX14 | APEFAGGPSVFLFPPKPKDTLMISRTPEVTCVVVDVSQEDPEVQFNWYV |
| | IgG4 Fc | DGVEVHNAKTKPREEQFNSTYRVVSVLTVLHQDWLNGKEYKCKVSNKGL |
| | (L235A) | PSSIEKTISKAKGQPREPQVYTLPPSQEEMTKNQVSLTCLVKGFYPSDI |
| | | AVEWESNGQPENNYKTTPPVLDSDGSFFLYSRLTVDKSRWQEGNVFSCS |
| | | VMHEALHNHYTQKSLSLSLG |
| 6 | TNX10 IgG1 Fc | APEAAGGPSVFLFPPKPKDTLMISRTPEVTCVVVDVSHEDPEVKFNWYV |
| | (L234A, | DGVEVHNAKTKPREEQYNSTYRVVSVLTVLHQDWLNGKEYKCKVSNKAL |
| | L235A) | PAPIEKTISKAKGQPREPQVYTLPPSRDELTKNQVSLTCLVKGFYPSDI |
| | | AVEWESNGQPENNYKTTPPVLDSDGSFFLYSKLTVDKSRWQQGNVFSCS |
| | | VMHEALHNHYTQKSLSLSPG |
| 7 | IgG1 Fc | APELLGGSSVFLFPPKPKDTLMISRTPEVTCVVVDVSHEDPEVKFNWYV |
| | (P238S, | DGVEVHNAKTKPREEQYQSTYRVVSVLTVLHQDWLNGKEYKCKVSNKAL |
| | N297Q) | PAPIEKTISKAKGQPREPQVYTLPPSRDELTKNQVSLTCLVKGFYPSDI |
| | | AVEWESNGQPENNYKTTPPVLDSDGSFFLYSKLTVDKSRWQQGNVFSCS |
| | | VMHEALHNHYTQKSLSLSPG |
| 8 | TNX06 | APEFLGGPSVFLFPPKPKDTLMISRTPEVTCVVVDVSQEDPEVQFNWYV |
| | Wildtype IgG4 | DGVEVHNAKTKPREEQFNSTYRVVSVLTVLHQDWLNGKEYKCKVSNKGL |
| | Fc | PSSIEKTISKAKGQPREPQVYTLPPSQEEMTKNQVSLTCLVKGFYPSDI |
| | | AVEWESNGQPENNYKTTPPVLDSDGSFFLYSRLTVDKSRWQEGNVFSCS |
| | | VMHEALHNHYTQKSLSLSLG |
| 9 | Wildtype IgG2 | APPVAGPSVFLFPPKPKDTLMISRTPEVTCVVVDVSHEDPEVQFNWYVD |
| | Fc | GMEVHNAKTKPREEQFNSTFRVVSVLTVVHQDWLNGKEYKCKVSNKGLP |
| | | APIEKTISKTKGQPREPQVYTLPPSREEMTKNQVSLTCLVKGFYPSDIA |
| | | VEWESNGQPENNYKTTPPMLDSDGSFFLYSKLTVDKSRWQQGNVFSCSV |
| | | MHEALHNHYTQKSLSLSPG |
| 237 | TNX07 IgG4 Fc | APEFLGGPSVFLFPPKPKDTLMISRTPEVTCVVVDVSQEDPEVQFNWYV |
| | (S228P) | DGVEVHNAKTKPREEQFNSTYRVVSVLTVLHQDWLNGKEYKCKVSNKGL |
| | | PSSIEKTISKAKGQPREPQVYTLPPSQEEMTKNQVSLTCLVKGFYPSDI |
| | | AVEWESNGQPENNYKTTPPVLDSDGSFFLYSRLTVDKSRWQEGNVFSCS |
| | | VMHEALHNHYTQKSLSLSLG |
| 238 | TNX08 IgG4 Fc | APEFEGGPSVFLFPPKPKDTLMISRTPEVTCVVVDVSQEDPEVQFNWYV |
| | (L235E) | DGVEVHNAKTKPREEQFNSTYRVVSVLTVLHQDWLNGKEYKCKVSNKGL |
| | | PSSIEKTISKAKGQPREPQVYTLPPSQEEMTKNQVSLTCLVKGFYPSDI |
| | | AVEWESNGQPENNYKTTPPVLDSDGSFFLYSRLTVDKSRWQEGNVFSCS |
| | | VMHEALHNHYTQKSLSLSLG |
| 239 | TNX09 IgG4 | APEAAGGPSVFLFPPKPKDTLMISRTPEVTCVVVDVSQEDPEVQFNWYV |
| | Fc (F234A, | DGVEVHNAKTKPREEQFNSTYRVVSVLTVLHQDWLNGKEYKCKVSNKGL |
| | L235A) | PSSIEKTISKAKGQPREPQVYTLPPSQEEMTKNQVSLTCLVKGFYPSDI |
| | | AVEWESNGQPENNYKTTPPVLDSDGSFFLYSRLTVDKSRWQEGNVFSCS |
| | | VMHEALHNHYTQKSLSLSLG |

Fc domain + terminal lysine

| | | |
|---|---|---|
| 10 | TNX01 IgG1 Fc | APELLGGPSVFLFPPKPKDTLMISRTPEVTCVVVDVSHEDPEVKFNWYV |
| | (N297Q) | DGVEVHNAKTKPREEQYQSTYRVVSVLTVLHQDWLNGKEYKCKVSNKAL |
| | | PAPIEKTISKAKGQPREPQVYTLPPSRDELTKNQVSLTCLVKGFYPSDI |
| | | AVEWESNGQPENNYKTTPPVLDSDGSFFLYSKLTVDKSRWQQGNVFSCS |
| | | VMHEALHNHYTQKSLSLSPGK |
| 11 | TNX02 IgG1 Fc | APELLGGPSVFLFPPKPKDTLMISRTPEVTCVVVDVSHEDPEVKFNWYV |
| | (wildtype) | DGVEVHNAKTKPREEQYNSTYRVVSVLTVLHQDWLNGKEYKCKVSNKAL |
| | | PAPIEKTISKAKGQPREPQVYTLPPSRDELTKNQVSLTCLVKGFYPSDI |
| | | AVEWESNGQPENNYKTTPPVLDSDGSFFLYSKLTVDKSRWQQGNVFSCS |
| | | VMHEALHNHYTQKSLSLSPGK |
| 12 | TNX03 IgG1 Fc | APELLGGPSVFLFPPKPKDTLMISRTPEVTCVVVDVSHEDPEVKFNWYV |
| | (N297G) | DGVEVHNAKTKPREEQYGSTYRVVSVLTVLHQDWLNGKEYKCKVSNKAL |
| | | PAPIEKTISKAKGQPREPQVYTLPPSRDELTKNQVSLTCLVKGFYPSDI |
| | | AVEWESNGQPENNYKTTPPVLDSDGSFFLYSKLTVDKSRWQQGNVFSCS |
| | | VMHEALHNHYTQKSLSLSPGK |
| 13 | TNX04 TNX11 | APELLGGSSVFLFPPKPKDTLMISRTPEVTCVVVDVSHEDPEVKFNWYV |
| | TNX12 TNX13 | DGVEVHNAKTKPREEQYNSTYRVVSVLTVLHQDWLNGKEYKCKVSNKAL |
| | IgG1 Fc | PAPIEKTISKAKGQPREPQVYTLPPSRDELTKNQVSLTCLVKGFYPSDI |
| | (P238S) | AVEWESNGQPENNYKTTPPVLDSDGSFFLYSKLTVDKSRWQQGNVFSCS |
| | | VMHEALHNHYTQKSLSLSPGK |
| 14 | TNX05 TNX14 | APEFAGGPSVFLFPPKPKDTLMISRTPEVTCVVVDVSQEDPEVQFNWYV |
| | IgG4 Fc | DGVEVHNAKTKPREEQFNSTYRVVSVLTVLHQDWLNGKEYKCKVSNKGL |
| | (L235A) | PSSIEKTISKAKGQPREPQVYTLPPSQEEMTKNQVSLTCLVKGFYPSDI |
| | | AVEWESNGQPENNYKTTPPVLDSDGSFFLYSRLTVDKSRWQEGNVFSCS |
| | | VMHEALHNHYTQKSLSLSLGK |
| 15 | TNX10 IgG1 Fc | APEAAGGPSVFLFPPKPKDTLMISRTPEVTCVVVDVSHEDPEVKFNWYV |
| | (L234A, | DGVEVHNAKTKPREEQYNSTYRVVSVLTVLHQDWLNGKEYKCKVSNKAL |
| | L235A) | PAPIEKTISKAKGQPREPQVYTLPPSRDELTKNQVSLTCLVKGFYPSDI |
| | | AVEWESNGQPENNYKTTPPVLDSDGSFFLYSKLTVDKSRWQQGNVFSCS |
| | | VMHEALHNHYTQKSLSLSPGK |
| 16 | IgG1 Fc | APELLGGSSVFLFPPKPKDTLMISRTPEVTCVVVDVSHEDPEVKFNWYV |
| | (P238S, | DGVEVHNAKTKPREEQYQSTYRVVSVLTVLHQDWLNGKEYKCKVSNKAL |
| | N297Q) | PAPIEKTISKAKGQPREPQVYTLPPSRDELTKNQVSLTCLVKGFYPSDI |
| | | AVEWESNGQPENNYKTTPPVLDSDGSFFLYSKLTVDKSRWQQGNVFSCS |
| | | VMHEALHNHYTQKSLSLSPGK |
| 17 | TNX06 | APEFLGGPSVFLFPPKPKDTLMISRTPEVTCVVVDVSQEDPEVQFNWYV |
| | Wildtype IgG4 | DGVEVHNAKTKPREEQFNSTYRVVSVLTVLHQDWLNGKEYKCKVSNKGL |
| | Fc | PSSIEKTISKAKGQPREPQVYTLPPSQEEMTKNQVSLTCLVKGFYPSDI |
| | | AVEWESNGQPENNYKTTPPVLDSDGSFFLYSRLTVDKSRWQEGNVFSCS |
| | | VMHEALHNHYTQKSLSLSLGK |
| 18 | Wildtype IgG2 | APPVAGPSVFLFPPKPKDTLMISRTPEVTCVVVDVSHEDPEVQFNWYVD |
| | Fc | GMEVHNAKTKPREEQFNSTFRVVSVLTVVHQDWLNGKEYKCKVSNKGLP |
| | | APIEKTISKTKGQPREPQVYTLPPSREEMTKNQVSLTCLVKGFYPSDIA |
| | | VEWESNGQPENNYKTTPPMLDSDGSFFLYSKLTVDKSRWQQGNVFSCSV |
| | | MHEALHNHYTQKSLSLSPGK |
| 240 | TNX08 IgG4 Fc | APEFEGGPSVFLFPPKPKDTLMISRTPEVTCVVVDVSQEDPEVQFNWYV |
| | (L235E) | DGVEVHNAKTKPREEQFNSTYRVVSVLTVLHQDWLNGKEYKCKVSNKGL |
| | | PSSIEKTISKAKGQPREPQVYTLPPSQEEMTKNQVSLTCLVKGFYPSDI |
| | | AVEWESNGQPENNYKTTPPVLDSDGSFFLYSRLTVDKSRWQEGNVFSCS |
| | | VMHEALHNHYTQKSLSLSLGK |
| 241 | TNX09 IgG4 | APEAAGGPSVFLFPPKPKDTLMISRTPEVTCVVVDVSQEDPEVQFNWYV |
| | Fc (F234A, | DGVEVHNAKTKPREEQFNSTYRVVSVLTVLHQDWLNGKEYKCKVSNKGL |
| | L235A) | PSSIEKTISKAKGQPREPQVYTLPPSQEEMTKNQVSLTCLVKGFYPSDI |
| | | AVEWESNGQPENNYKTTPPVLDSDGSFFLYSRLTVDKSRWQEGNVFSCS |
| | | VMHEALHNHYTQKSLSLSLGK |

Fc region, no terminal lysine

| | | |
|---|---|---|
| 19 | TNX01 IgG1 | EPKSCDKTHTCPPCPAPELLGGPSVFLFPPKPKDTLMISRTPEVTCVVV |
| | hinge-Fc | DVSHEDPEVKFNWYVDGVEVHNAKTKPREEQYQSTYRVVSVLTVLHQDW |
| | (N297Q) | LNGKEYKCKVSNKALPAPIEKTISKAKGQPREPQVYTLPPSRDELTKNQ |
| | | VSLTCLVKGFYPSDIAVEWESNGQPENNYKTTPPVLDSDGSFFLYSKLT |
| | | VDKSRWQQGNVFSCSVMHEALHNHYTQKSLSLSPG |
| 20 | TNX02 IgG1 | EPKSCDKTHTCPPCPAPELLGGPSVFLFPPKPKDTLMISRTPEVTCVVV |
| | hinge-Fc | DVSHEDPEVKFNWYVDGVEVHNAKTKPREEQYNSTYRVVSVLTVLHQDW |
| | (wildtype) | LNGKEYKCKVSNKALPAPIEKTISKAKGQPREPQVYTLPPSRDELTKNQ |
| | | VSLTCLVKGFYPSDIAVEWESNGQPENNYKTTPPVLDSDGSFFLYSKLT |
| | | VDKSRWQQGNVFSCSVMHEALHNHYTQKSLSLSPG |
| 21 | TNX03 IgG1 | EPKSCDKTHTCPPCPAPELLGGPSVFLFPPKPKDTLMISRTPEVTCVVV |
| | hinge-Fc | DVSHEDPEVKFNWYVDGVEVHNAKTKPREEQYGSTYRVVSVLTVLHQDW |
| | (N297G) | LNGKEYKCKVSNKALPAPIEKTISKAKGQPREPQVYTLPPSRDELTKNQ |
| | | VSLTCLVKGFYPSDIAVEWESNGQPENNYKTTPPVLDSDGSFFLYSKLT |
| | | VDKSRWQQGNVFSCSVMHEALHNHYTQKSLSLSPG |
| 22 | TNX04 IgG1 | EPKSSDKTHTSPPSPAPELLGGSSVFLFPPKPKDTLMISRTPEVTCVVV |
| | hinge-Fc | DVSHEDPEVKFNWYVDGVEVHNAKTKPREEQYNSTYRVVSVLTVLHQDW |
| | (C220S, | LNGKEYKCKVSNKALPAPIEKTISKAKGQPREPQVYTLPPSRDELTKNQ |
| | C226S, C229S, | VSLTCLVKGFYPSDIAVEWESNGQPENNYKTTPPVLDSDGSFFLYSKLT |
| | P238S) | VDKSRWQQGNVFSCSVMHEALHNHYTQKSLSLSPG |
| 23 | TNX05 TNX14 | ESKYGPPCPPCPAPEFAGGPSVFLFPPKPKDTLMISRTPEVTCVVVDVS |
| | hinge-Fc IgG4 | QEDPEVQFNWYVDGVEVHNAKTKPREEQFNSTYRVVSVLTVLHQDWLNG |
| | (S228P, | KEYKCKVSNKGLPSSIEKTISKAKGQPREPQVYTLPPSQEEMTKNQVSL |
| | L235A) | TCLVKGFYPSDIAVEWESNGQPENNYKTTPPVLDSDGSFFLYSRLTVDK |
| | | SRWQEGNVFSCSVMHEALHNHYTQKSLSLSLG |
| 24 | TNX10 IgG1 | EPKSCDKTHTCPPCPAPEAAGGPSVFLFPPKPKDTLMISRTPEVTCVVV |
| | hinge-Fc | DVSHEDPEVKFNWYVDGVEVHNAKTKPREEQYNSTYRVVSVLTVLHQDW |
| | (L234A, | LNGKEYKCKVSNKALPAPIEKTISKAKGQPREPQVYTLPPSRDELTKNQ |
| | L235A) | VSLTCLVKGFYPSDIAVEWESNGQPENNYKTTPPVLDSDGSFFLYSKLT |
| | | VDKSRWQQGNVFSCSVMHEALHNHYTQKSLSLSPG |
| 25 | IgG1 hinge-Fc | EPKSCDKTHTCPPCPAPELLGGSSVFLFPPKPKDTLMISRTPEVTCVVV |
| | (P238S) | DVSHEDPEVKFNWYVDGVEVHNAKTKPREEQYNSTYRVVSVLTVLHQDW |
| | | LNGKEYKCKVSNKALPAPIEKTISKAKGQPREPQVYTLPPSRDELTKNQ |
| | | VSLTCLVKGFYPSDIAVEWESNGQPENNYKTTPPVLDSDGSFFLYSKLT |
| | | VDKSRWQQGNVFSCSVMHEALHNHYTQKSLSLSPG |
| 26 | IgG1 hinge-Fc | EPKSCDKTHTCPPCPAPELLGGSSVFLFPPKPKDTLMISRTPEVTCVVV |
| | (P238S, | DVSHEDPEVKFNWYVDGVEVHNAKTKPREEQYQSTYRVVSVLTVLHQDW |
| | N297Q) | LNGKEYKCKVSNKALPAPIEKTISKAKGQPREPQVYTLPPSRDELTKNQ |
| | | VSLTCLVKGFYPSDIAVEWESNGQPENNYKTTPPVLDSDGSFFLYSKLT |
| | | VDKSRWQQGNVFSCSVMHEALHNHYTQKSLSLSPG |
| 27 | TNX06 | ESKYGPPCPSCPAPEFLGGPSVFLFPPKPKDTLMISRTPEVTCVVVDVS |
| | Wildtype | QEDPEVQFNWYVDGVEVHNAKTKPREEQFNSTYRVVSVLTVLHQDWLNG |
| | hinge-IgG4 Fc | KEYKCKVSNKGLPSSIEKTISKAKGQPREPQVYTLPPSQEEMTKNQVSL |
| | | TCLVKGFYPSDIAVEWESNGQPENNYKTTPPVLDSDGSFFLYSRLTVDK |
| | | SRWQEGNVFSCSVMHEALHNHYTQKSLSLSLG |
| 28 | Wildtype | ERKCCVECPPCPAPPVAGPSVFLFPPKPKDTLMISRTPEVTCVVVDVSH |
| | hinge-IgG2 Fc | EDPEVQFNWYVDGMEVHNAKTKPREEQFNSTFRVVSVLTVVHQDWLNGK |
| | | EYKCKVSNKGLPAPIEKTISKTKGQPREPQVYTLPPSREEMTKNQVSLT |
| | | CLVKGFYPSDIAVEWESNGQPENNYKTTPPMLDSDGSFFLYSKLTVDKS |
| | | RWQQGNVFSCSVMHEALHNHYTQKSLSLSPG |
| 29 | IgG1 hinge-Fc | EPKSSDKTHTSPPSPAPELLGGSSVFLFPPKPKDTLMISRTPEVTCVVV |
| | (C220S, | DVSHEDPEVKFNWYVDGVEVHNAKTKPREEQYQSTYRVVSVLTVLHQDW |
| | C226S, C229S, | LNGKEYKCKVSNKALPAPIEKTISKAKGQPREPQVYTLPPSRDELTKNQ |
| | P238S, N297Q) | VSLTCLVKGFYPSDIAVEWESNGQPENNYKTTPPVLDSDGSFFLYSKLT |
| | | VDKSRWQQGNVFSCSVMHEALHNHYTQKSLSLSPG |
| 30 | IgG1 hinge-Fc | EPKSSDKTHTSPPSPAPELLGGPSVFLFPPKPKDTLMISRTPEVTCVVV |
| | (C220S, | DVSHEDPEVKFNWYVDGVEVHNAKTKPREEQYNSTYRVVSVLTVLHQDW |
| | C226S, C229S) | LNGKEYKCKVSNKALPAPIEKTISKAKGQPREPQVYTLPPSRDELTKNQ |
| | | VSLTCLVKGFYPSDIAVEWESNGQPENNYKTTPPVLDSDGSFFLYSKLT |
| | | VDKSRWQQGNVFSCSVMHEALHNHYTQKSLSLSPG |
| 31 | IgG1 hinge-Fc | EPKSSDKTHTCPPCPAPELLGGPSVFLFPPKPKDTLMISRTPEVTCVVV |
| | (C220S, | DVSHEDPEVKFNWYVDGVEVHNAKTKPREEQYQSTYRVVSVLTVLHQDW |
| | N297Q) | LNGKEYKCKVSNKALPAPIEKTISKAKGQPREPQVYTLPPSRDELTKNQ |
| | | VSLTCLVKGFYPSDIAVEWESNGQPENNYKTTPPVLDSDGSFFLYSKLT |
| | | VDKSRWQQGNVFSCSVMHEALHNHYTQKSLSLSPG |
| 32 | IgG1 short- | THTSPPSPAPELLGGSSVFLFPPKPKDTLMISRTPEVTCVVVDVSHEDP |
| | hinge-Fc | EVKFNWYVDGVEVHNAKTKPREEQYNSTYRVVSVLTVLHQDWLNGKEYK |
| | (C226S, | CKVSNKALPAPIEKTISKAKGQPREPQVYTLPPSRDELTKNQVSLTCLV |
| | C229S, P238S) | KGFYPSDIAVEWESNGQPENNYKTTPPVLDSDGSFFLYSKLTVDKSRWQ |
| | | QGNVFSCSVMHEALHNHYTQKSLSLSPG |
| 33 | IgG1 short- | THTSPPSPAPELLGGPSVFLFPPKPKDTLMISRTPEVTCVVVDVSHEDP |
| | hinge-Fc | EVKFNWYVDGVEVHNAKTKPREEQYNSTYRVVSVLTVLHQDWLNGKEYK |
| | (C226S, | CKVSNKALPAPIEKTISKAKGQPREPQVYTLPPSRDELTKNQVSLTCLV |
| | C229S) | KGFYPSDIAVEWESNGQPENNYKTTPPVLDSDGSFFLYSKLTVDKSRWQ |
| | | QGNVFSCSVMHEALHNHYTQKSLSLSPG |
| 34 | IgG1 short- | THTSPPSPAPELLGGSSVFLFPPKPKDTLMISRTPEVTCVVVDVSHEDP |
| | hinge-Fc | EVKFNWYVDGVEVHNAKTKPREEQYQSTYRVVSVLTVLHQDWLNGKEYK |
| | (C226S, | CKVSNKALPAPIEKTISKAKGQPREPQVYTLPPSRDELTKNQVSLTCLV |
| | C229S, P238S, | KGFYPSDIAVEWESNGQPENNYKTTPPVLDSDGSFFLYSKLTVDKSRWQ |
| | N297Q) | QGNVFSCSVMHEALHNHYTQKSLSLSPG |
| 35 | IgG1 short- | THTSPPSPAPELLGGPSVFLFPPKPKDTLMISRTPEVTCVVVDVSHEDP |
| | hinge-Fc | EVKFNWYVDGVEVHNAKTKPREEQYQSTYRVVSVLTVLHQDWLNGKEYK |
| | (C226S, | CKVSNKALPAPIEKTISKAKGQPREPQVYTLPPSRDELTKNQVSLTCLV |
| | C229S, N297Q) | KGFYPSDIAVEWESNGQPENNYKTTPPVLDSDGSFFLYSKLTVDKSRWQ |
| | | QGNVFSCSVMHEALHNHYTQKSLSLSPG |
| 36 | IgG1 short- | THTCPPCPAPELLGGPSVFLFPPKPKDTLMISRTPEVTCVVVDVSHEDP |
| | hinge-Fc | EVKFNWYVDGVEVHNAKTKPREEQYQSTYRVVSVLTVLHQDWLNGKEYK |
| | (N297Q) | CKVSNKALPAPIEKTISKAKGQPREPQVYTLPPSRDELTKNQVSLTCLV |
| | | KGFYPSDIAVEWESNGQPENNYKTTPPVLDSDGSFFLYSKLTVDKSRWQ |
| | | QGNVFSCSVMHEALHNHYTQKSLSLSPG |
| 37 | TNX11 IgG1 | EPKSCDKTHTSPPSPAPELLGGSSVFLFPPKPKDTLMISRTPEVTCVVV |
| | hinge-Fc | DVSHEDPEVKFNWYVDGVEVHNAKTKPREEQYNSTYRVVSVLTVLHQDW |
| | (C226S, | LNGKEYKCKVSNKALPAPIEKTISKAKGQPREPQVYTLPPSRDELTKNQ |
| | C229S, P238S) | VSLTCLVKGFYPSDIAVEWESNGQPENNYKTTPPVLDSDGSFFLYSKLT |
| | | VDKSRWQQGNVFSCSVMHEALHNHYTQKSLSLSPG |
| 242 | TNX07 IgG4 | ESKYGPPCPPCPAPEFLGGPSVFLFPPKPKDTLMISRTPEVTCVVVDVS |
| | hinge-Fc | QEDPEVQFNWYVDGVEVHNAKTKPREEQFNSTYRVVSVLTVLHQDWLNG |
| | (S228P) | KEYKCKVSNKGLPSSIEKTISKAKGQPREPQVYTLPPSQEEMTKNQVSL |
| | | TCLVKGFYPSDIAVEWESNGQPENNYKTTPPVLDSDGSFFLYSRLTVDK |
| | | SRWQEGNVFSCSVMHEALHNHYTQKSLSLSLG |
| 243 | TNX08 IgG4 | ESKYGPPCPPCPAPEFEGGPSVFLFPPKPKDTLMISRTPEVTCVVVDVS |
| | hinge-Fc | QEDPEVQFNWYVDGVEVHNAKTKPREEQFNSTYRVVSVLTVLHQDWLNG |
| | (L235E) | KEYKCKVSNKGLPSSIEKTISKAKGQPREPQVYTLPPSQEEMTKNQVSL |
| | | TCLVKGFYPSDIAVEWESNGQPENNYKTTPPVLDSDGSFFLYSRLTVDK |
| | | SRWQEGNVFSCSVMHEALHNHYTQKSLSLSLG |
| 244 | TNX09 IgG4 | ESKYGPPCPPCPAPEAAGGPSVFLFPPKPKDTLMISRTPEVTCVVVDVS |
| | hinge- | QEDPEVQFNWYVDGVEVHNAKTKPREEQFNSTYRVVSVLTVLHQDWLNG |
| | Fc (F234A, | KEYKCKVSNKGLPSSIEKTISKAKGQPREPQVYTLPPSQEEMTKNQVSL |
| | L235A) | TCLVKGFYPSDIAVEWESNGQPENNYKTTPPVLDSDGSFFLYSRLTVDK |
| | | SRWQEGNVFSCSVMHEALHNHYTQKSLSLSLG |
| 245 | TNX12 IgG1 | EPKSCDKTHTCPPSPAPELLGGSSVFLFPPKPKDTLMISRTPEVTCVVV |
| | hinge-Fc | DVSHEDPEVKFNWYVDGVEVHNAKTKPREEQYNSTYRVVSVLTVLHQDW |
| | (C229S, | LNGKEYKCKVSNKALPAPIEKTISKAKGQPREPQVYTLPPSRDELTKNQ |
| | P238S) | VSLTCLVKGFYPSDIAVEWESNGQPENNYKTTPPVLDSDGSFFLYSKLT |
| | | VDKSRWQQGNVFSCSVMHEALHNHYTQKSLSLSPG |
| 246 | TNX13 IgG1 | EPKSCDKTHTSPPCPAPELLGGSSVFLFPPKPKDTLMISRTPEVTCVVV |
| | hinge-Fc | DVSHEDPEVKFNWYVDGVEVHNAKTKPREEQYNSTYRVVSVLTVLHQDW |
| | (C226S, | LNGKEYKCKVSNKALPAPIEKTISKAKGQPREPQVYTLPPSRDELTKNQ |
| | P238S) | VSLTCLVKGFYPSDIAVEWESNGQPENNYKTTPPVLDSDGSFFLYSKLT |
| | | VDKSRWQQGNVFSCSVMHEALHNHYTQKSLSLSPG |

Fc region + terminal lysine

| | | |
|---|---|---|
| 38 | TNX01 IgG1 | EPKSCDKTHTCPPCPAPELLGGPSVFLFPPKPKDTLMISRTPEVTCVVV |
| | hinge-Fc | DVSHEDPEVKFNWYVDGVEVHNAKTKPREEQYQSTYRVVSVLTVLHQDW |
| | (N297Q) | LNGKEYKCKVSNKALPAPIEKTISKAKGQPREPQVYTLPPSRDELTKNQ |
| | | VSLTCLVKGFYPSDIAVEWESNGQPENNYKTTPPVLDSDGSFFLYSKLT |
| | | VDKSRWQQGNVFSCSVMHEALHNHYTQKSLSLSPGK |
| 39 | TNX02 IgG1 | EPKSCDKTHTCPPCPAPELLGGPSVFLFPPKPKDTLMISRTPEVTCVVV |
| | hinge-Fc | DVSHEDPEVKFNWYVDGVEVHNAKTKPREEQYNSTYRVVSVLTVLHQDW |
| | (wildtype) | LNGKEYKCKVSNKALPAPIEKTISKAKGQPREPQVYTLPPSRDELTKNQ |
| | | VSLTCLVKGFYPSDIAVEWESNGQPENNYKTTPPVLDSDGSFFLYSKLT |
| | | VDKSRWQQGNVFSCSVMHEALHNHYTQKSLSLSPGK |
| 40 | TNX03 IgG1 | EPKSCDKTHTCPPCPAPELLGGPSVFLFPPKPKDTLMISRTPEVTCVVV |
| | hinge-Fc | DVSHEDPEVKFNWYVDGVEVHNAKTKPREEQYGSTYRVVSVLTVLHQDW |
| | (N297G) | LNGKEYKCKVSNKALPAPIEKTISKAKGQPREPQVYTLPPSRDELTKNQ |
| | | VSLTCLVKGFYPSDIAVEWESNGQPENNYKTTPPVLDSDGSFFLYSKLT |
| | | VDKSRWQQGNVFSCSVMHEALHNHYTQKSLSLSPGK |
| 41 | TNX04 IgG1 | EPKSSDKTHTSPPSPAPELLGGSSVFLFPPKPKDTLMISRTPEVTCVVV |
| | hinge-Fc | DVSHEDPEVKFNWYVDGVEVHNAKTKPREEQYNSTYRVVSVLTVLHQDW |
| | (C220S, | LNGKEYKCKVSNKALPAPIEKTISKAKGQPREPQVYTLPPSRDELTKNQ |
| | C226S, C229S, | VSLTCLVKGFYPSDIAVEWESNGQPENNYKTTPPVLDSDGSFFLYSKLT |
| | P238S) | VDKSRWQQGNVFSCSVMHEALHNHYTQKSLSLSPGK |
| 42 | TNX05 hinge- | ESKYGPPCPPCPAPEFAGGPSVFLFPPKPKDTLMISRTPEVTCVVVDVS |
| | Fc IgG4 | QEDPEVQFNWYVDGVEVHNAKTKPREEQFNSTYRVVSVLTVLHQDWLNG |
| | (S228P, | KEYKCKVSNKGLPSSIEKTISKAKGQPREPQVYTLPPSQEEMTKNQVSL |
| | L235A) | TCLVKGFYPSDIAVEWESNGQPENNYKTTPPVLDSDGSFFLYSRLTVDK |
| | | SRWQEGNVFSCSVMHEALHNHYTQKSLSLSLGK |
| 43 | TNX10 IgG1 | EPKSCDKTHTCPPCPAPEAAGGPSVFLFPPKPKDTLMISRTPEVTCVVV |
| | hinge-Fc | DVSHEDPEVKFNWYVDGVEVHNAKTKPREEQYNSTYRVVSVLTVLHQDW |
| | (L234A, | LNGKEYKCKVSNKALPAPIEKTISKAKGQPREPQVYTLPPSRDELTKNQ |
| | L235A) | VSLTCLVKGFYPSDIAVEWESNGQPENNYKTTPPVLDSDGSFFLYSKLT |
| | | VDKSRWQQGNVFSCSVMHEALHNHYTQKSLSLSPGK |
| 44 | IgG1 hinge-Fc | EPKSCDKTHTCPPCPAPELLGGSSVFLFPPKPKDTLMISRTPEVTCVVV |
| | (P238S) | DVSHEDPEVKFNWYVDGVEVHNAKTKPREEQYNSTYRVVSVLTVLHQDW |
| | | LNGKEYKCKVSNKALPAPIEKTISKAKGQPREPQVYTLPPSRDELTKNQ |
| | | VSLTCLVKGFYPSDIAVEWESNGQPENNYKTTPPVLDSDGSFFLYSKLT |
| | | VDKSRWQQGNVFSCSVMHEALHNHYTQKSLSLSPGK |
| 45 | IgG1 hinge-Fc | EPKSCDKTHTCPPCPAPELLGGSSVFLFPPKPKDTLMISRTPEVTCVVV |
| | (P238S, | DVSHEDPEVKFNWYVDGVEVHNAKTKPREEQYQSTYRVVSVLTVLHQDW |
| | N297Q) | LNGKEYKCKVSNKALPAPIEKTISKAKGQPREPQVYTLPPSRDELTKNQ |
| | | VSLTCLVKGFYPSDIAVEWESNGQPENNYKTTPPVLDSDGSFFLYSKLT |
| | | VDKSRWQQGNVFSCSVMHEALHNHYTQKSLSLSPGK |
| 46 | TNX06 | ESKYGPPCPSCPAPEFLGGPSVFLFPPKPKDTLMISRTPEVTCVVVDVS |
| | Wildtype | QEDPEVQFNWYVDGVEVHNAKTKPREEQFNSTYRVVSVLTVLHQDWLNG |
| | hinge-IgG4 Fc | KEYKCKVSNKGLPSSIEKTISKAKGQPREPQVYTLPPSQEEMTKNQVSL |
| | | TCLVKGFYPSDIAVEWESNGQPENNYKTTPPVLDSDGSFFLYSRLTVDK |
| | | SRWQEGNVFSCSVMHEALHNHYTQKSLSLSLGK |
| 47 | Wildtype | ERKCCVECPPCPAPPVAGPSVFLFPPKPKDTLMISRTPEVTCVVVDVSH |
| | hinge-IgG2 Fc | EDPEVQFNWYVDGMEVHNAKTKPREEQFNSTFRVVSVLTVVHQDWLNGK |
| | | EYKCKVSNKGLPAPIEKTISKTKGQPREPQVYTLPPSREEMTKNQVSLT |
| | | CLVKGFYPSDIAVEWESNGQPENNYKTTPPMLDSDGSFFLYSKLTVDKS |
| | | RWQQGNVFSCSVMHEALHNHYTQKSLSLSPGK |
| 48 | IgG1 hinge-Fc | EPKSSDKTHTSPPSPAPELLGGSSVFLFPPKPKDTLMISRTPEVTCVVV |
| | (C220S, | DVSHEDPEVKFNWYVDGVEVHNAKTKPREEQYQSTYRVVSVLTVLHQDW |
| | C226S, C229S, | LNGKEYKCKVSNKALPAPIEKTISKAKGQPREPQVYTLPPSRDELTKNQ |
| | P238S, N297Q) | VSLTCLVKGFYPSDIAVEWESNGQPENNYKTTPPVLDSDGSFFLYSKLT |
| | | VDKSRWQQGNVFSCSVMHEALHNHYTQKSLSLSPGK |
| 49 | IgG1 hinge-Fc | EPKSSDKTHTSPPSPAPELLGGPSVFLFPPKPKDTLMISRTPEVTCVVV |
| | (C220S, | DVSHEDPEVKFNWYVDGVEVHNAKTKPREEQYNSTYRVVSVLTVLHQDW |
| | C226S, C229S) | LNGKEYKCKVSNKALPAPIEKTISKAKGQPREPQVYTLPPSRDELTKNQ |
| | | VSLTCLVKGFYPSDIAVEWESNGQPENNYKTTPPVLDSDGSFFLYSKLT |
| | | VDKSRWQQGNVFSCSVMHEALHNHYTQKSLSLSPGK |
| 50 | IgG1 hinge-Fc | EPKSSDKTHTCPPCPAPELLGGPSVFLFPPKPKDTLMISRTPEVTCVVV |
| | (C220S, | DVSHEDPEVKFNWYVDGVEVHNAKTKPREEQYQSTYRVVSVLTVLHQDW |
| | N297Q) | LNGKEYKCKVSNKALPAPIEKTISKAKGQPREPQVYTLPPSRDELTKNQ |
| | | VSLTCLVKGFYPSDIAVEWESNGQPENNYKTTPPVLDSDGSFFLYSKLT |
| | | VDKSRWQQGNVFSCSVMHEALHNHYTQKSLSLSPGK |
| 51 | IgG1 short- | THTSPPSPAPELLGGSSVFLFPPKPKDTLMISRTPEVTCVVVDVSHEDP |
| | hinge-Fc | EVKFNWYVDGVEVHNAKTKPREEQYNSTYRVVSVLTVLHQDWLNGKEYK |
| | (C226S, | CKVSNKALPAPIEKTISKAKGQPREPQVYTLPPSRDELTKNQVSLTCLV |
| | C229S, P238S) | KGFYPSDIAVEWESNGQPENNYKTTPPVLDSDGSFFLYSKLTVDKSRWQ |
| | | QGNVFSCSVMHEALHNHYTQKSLSLSPGK |
| 52 | IgG1 short- | THTSPPSPAPELLGGPSVFLFPPKPKDTLMISRTPEVTCVVVDVSHEDP |
| | hinge-Fc | EVKFNWYVDGVEVHNAKTKPREEQYNSTYRVVSVLTVLHQDWLNGKEYK |
| | (C226S, | CKVSNKALPAPIEKTISKAKGQPREPQVYTLPPSRDELTKNQVSLTCLV |
| | C229S) | KGFYPSDIAVEWESNGQPENNYKTTPPVLDSDGSFFLYSKLTVDKSRWQ |
| | | QGNVFSCSVMHEALHNHYTQKSLSLSPGK |
| 53 | IgG1 short- | THTSPPSPAPELLGGSSVFLFPPKPKDTLMISRTPEVTCVVVDVSHEDP |
| | hinge-Fc | EVKFNWYVDGVEVHNAKTKPREEQYQSTYRVVSVLTVLHQDWLNGKEYK |
| | (C226S, | CKVSNKALPAPIEKTISKAKGQPREPQVYTLPPSRDELTKNQVSLTCLV |
| | C229S, P238S, | KGFYPSDIAVEWESNGQPENNYKTTPPVLDSDGSFFLYSKLTVDKSRWQ |
| | N297Q) | QGNVFSCSVMHEALHNHYTQKSLSLSPGK |
| 54 | IgG1 short- | THTSPPSPAPELLGGPSVFLFPPKPKDTLMISRTPEVTCVVVDVSHEDP |
| | hinge-Fc | EVKFNWYVDGVEVHNAKTKPREEQYQSTYRVVSVLTVLHQDWLNGKEYK |
| | (C226S, | CKVSNKALPAPIEKTISKAKGQPREPQVYTLPPSRDELTKNQVSLTCLV |
| | C229S, N297Q) | KGFYPSDIAVEWESNGQPENNYKTTPPVLDSDGSFFLYSKLTVDKSRWQ |
| | | QGNVFSCSVMHEALHNHYTQKSLSLSPGK |
| 55 | IgG1 short- | THTCPPCPAPELLGGPSVFLFPPKPKDTLMISRTPEVTCVVVDVSHEDP |
| | hinge-Fc | EVKFNWYVDGVEVHNAKTKPREEQYQSTYRVVSVLTVLHQDWLNGKEYK |
| | (N297Q) | CKVSNKALPAPIEKTISKAKGQPREPQVYTLPPSRDELTKNQVSLTCLV |
| | | KGFYPSDIAVEWESNGQPENNYKTTPPVLDSDGSFFLYSKLTVDKSRWQ |
| | | QGNVFSCSVMHEALHNHYTQKSLSLSPGK |
| 56 | TNX11 IgG1 | EPKSCDKTHTSPPSPAPELLGGSSVFLFPPKPKDTLMISRTPEVTCVVV |
| | hinge-Fc | DVSHEDPEVKFNWYVDGVEVHNAKTKPREEQYNSTYRVVSVLTVLHQDW |
| | (C226S, | LNGKEYKCKVSNKALPAPIEKTISKAKGQPREPQVYTLPPSRDELTKNQ |
| | C229S, P238S) | VSLTCLVKGFYPSDIAVEWESNGQPENNYKTTPPVLDSDGSFFLYSKLT |
| | | VDKSRWQQGNVFSCSVMHEALHNHYTQKSLSLSPGK |
| 247 | TNX08 IgG4 | ESKYGPPCPPCPAPEFEGGPSVFLFPPKPKDTLMISRTPEVTCVVVDVS |
| | hinge-Fc | QEDPEVQFNWYVDGVEVHNAKTKPREEQFNSTYRVVSVLTVLHQDWLNG |
| | (S228P, | KEYKCKVSNKGLPSSIEKTISKAKGQPREPQVYTLPPSQEEMTKNQVSL |
| | L235E) | TCLVKGFYPSDIAVEWESNGQPENNYKTTPPVLDSDGSFFLYSRLTVDK |
| | | SRWQEGNVFSCSVMHEALHNHYTQKSLSLSLGK |
| 248 | TNX09 IgG4 | ESKYGPPCPPCPAPEAAGGPSVFLFPPKPKDTLMISRTPEVTCVVVDVS |
| | hinge-Fc | QEDPEVQFNWYVDGVEVHNAKTKPREEQFNSTYRVVSVLTVLHQDWLNG |
| | (S228P, | KEYKCKVSNKGLPSSIEKTISKAKGQPREPQVYTLPPSQEEMTKNQVSL |
| | F234A, L235A) | TCLVKGFYPSDIAVEWESNGQPENNYKTTPPVLDSDGSFFLYSRLTVDK |
| | | SRWQEGNVFSCSVMHEALHNHYTQKSLSLSLGK |
| 249 | TNX12 IgG1 | EPKSCDKTHTCPPSPAPELLGGSSVFLFPPKPKDTLMISRTPEVTCVVV |
| | hinge-Fc | DVSHEDPEVKFNWYVDGVEVHNAKTKPREEQYNSTYRVVSVLTVLHQDW |
| | (C229S, | LNGKEYKCKVSNKALPAPIEKTISKAKGQPREPQVYTLPPSRDELTKNQ |
| | P238S) | VSLTCLVKGFYPSDIAVEWESNGQPENNYKTTPPVLDSDGSFFLYSKLT |
| | | VDKSRWQQGNVFSCSVMHEALHNHYTQKSLSLSPGK |
| 250 | TNX13 IgG1 | EPKSCDKTHTSPPCPAPELLGGSSVFLFPPKPKDTLMISRTPEVTCVVV |
| | hinge-Fc | DVSHEDPEVKFNWYVDGVEVHNAKTKPREEQYNSTYRVVSVLTVLHQDW |
| | (C226S, | LNGKEYKCKVSNKALPAPIEKTISKAKGQPREPQVYTLPPSRDELTKNQ |
| | P238S) | VSLTCLVKGFYPSDIAVEWESNGQPENNYKTTPPVLDSDGSFFLYSKLT |
| | | VDKSRWQQGNVFSCSVMHEALHNHYTQKSLSLSPGK |
| 251 | TNX14 IgG4 | ESKYGPPCPPCPAPEFAGGPSVFLFPPKPKDTLMISRTPEVTCVVVDVS |
| | hinge-Fc | QEDPEVQFNWYVDGVEVHNAKTKPREEQFNSTYRVVSVLTVLHQDWLNG |
| | (L115T, | KEYKCKVSNKGLPSSIEKTISKAKGQPREPQVYTLPPSQEEMTKNQVSL |
| | S228P, L235A) | TCLVKGFYPSDIAVEWESNGQPENNYKTTPPVLDSDGSFFLYSRLTVDK |
| | | SRWQEGNVFSCSVMHEALHNHYTQKSLSLSLGK |

Heavy and light chain components (CDRs, VH, VL CH1, CH2, CH3)

| | | |
|---|---|---|
| 57 | CDR H1 | SYYMY |
| 58 | CDR H2 | EINPSNGDTNFNEKFKS |
| 59 | CDR H3 | SDGRNDMDS |
| 60 | CDR Li | ISCRASQRVSSSTYSYMH |
| 61 | CDR L2 | YASNLES |
| 62 | CDR L3 | QHSWEIPPT |
| 63 | VH full (with | MPLLLLLPLLWAGALAQVQLVQSGAEVVKPGASVKLSCKASGYIFTSYY |
| | leader) | MYWVKQAPGQGLEWIGEINPSNGDTNFNEKFKSKATLTVDKSASTAYME |
| | | LSSLRSEDTAVYYCTRSDGRNDMDSWGQGTLVTVSS |
| 64 | VH full (no | QVQLVQSGAEVVKPGASVKLSCKASGYIFTSYYMYWVKQAPGQGLEWIG |
| | leader) | EINPSNGDTNFNEKFKSKATLTVDKSASTAYMELSSLRSEDTAVYYCTR |
| | | SDGRNDMDSWGQGTLVTVSS |
| 252 | VH full (with | MPLLLLLPLLWAGALAQVQLVQSGAEVVKPGASVKLSCKASGYIFTSYY |
| | leader) | MYWVKQAPGQGLEWIGEINPSNGDTNFNEKFKSKATLTVDKSASTAYME |
| | (L115T) | LSSLRSEDTAVYYCTRSDGRNDMDSWGQGTTVTVSS |
| 253 | VH full (no | QVQLVQSGAEVVKPGASVKLSCKASGYIFTSYYMYWVKQAPGQGLEWIG |
| | leader) | EINPSNGDTNFNEKFKSKATLTVDKSASTAYMELSSLRSEDTAVYYCTR |
| | (L115T) | SDGRNDMDSWGQGTTVTVSS |
| 65 | VL full (with | MRLPAQLLGLLMLWVSGSSGDIVLTQSPATLSVSPGERATISCRASQRV |
| | leader) | SSSTYSYMHWYQQKPGQPPKLLIKYASNLESGVPARFSGSGSGTDFTLT |
| | | ISSVEPEDFATYYCQHSWEIPPTFGGGTKLEIK |
| 66 | VL full (no | DIVLTQSPATLSVSPGERATISCRASQRVSSSTYSYMHWYQQKPGQPPK |
| | leader) | LLIKYASNLESGVPARFSGSGSGTDFTLTISSVEPEDFATYYCQHSWEI |
| | | PPTFGGGTKLEIK |
| 67 | IgG1 CH1 | ASTKGPSVFPLAPSSKSTSGGTAALGCLVKDYFPEPVTVSWNSGALTSG |
| | (wildtype) | VHTFPAVLQSSGLYSLSSVVTVPSSSLGTQTYICNVNHKPSNTKVDKKV |
| | (118-215 EU | |
| | Numbering) | |
| 68 | IgG1 CH2 | APELLGGPSVFLFPPKPKDTLMISRTPEVTCVVVDVSHEDPEVKFNWYV |
| | (wildtype) | DGVEVHNAKTKPREEQYNSTYRVVSVLTVLHQDWLNGKEYKCKVSNKAL |
| | (231-340) | PAPIEKTISKAK |
| 69 | IgG1 CH3 | GQPREPQVYTLPPSRDELTKNQVSLTCLVKGFYPSDIAVEWESNGQPEN |
| | (wildtype) | NYKTTPPVLDSDGSFFLYSKLTVDKSRWQQGNVFSCSVMHEALHNHYTQ |
| | (341-446) | KSLSLSPGK |
| 70 | IgG2 CH1 | ASTKGPSVFPLAPCSRSTSESTAALGCLVKDYFPEPVTVSWNSGALTSG |
| | (wildtype) | VHTFPAVLQSSGLYSLSSVVTVPSSNFGTQTYTCNVDHKPSNTKVDKTV |
| 71 | IgG2 CH2 | APPVAGPSVFLFPPKPKDTLMISRTPEVTCVVVDVSHEDPEVQFNWYVD |
| | (wildtype) | GVEVHNAKTKPREEQFNSTFRVVSVLTVVHQDWLNGKEYKCKVSNKGLP |
| | (231-339 EU) | APIEKTISKTK |
| 72 | IgG2 CH3 | GQPREPQVYTLPPSREEMTKNQVSLTCLVKGFYPSDISVEWESNGQPEN |
| | (wildtype) | NYKTTPPMLDSDGSFFLYSKLTVDKSRWQQGNVFSCSVMHEALHNHYTQ |
| | (340-446 EU) | KSLSLSPGK |
| 73 | IgG4 CH1 | ASTKGPSVFPLAPCSRSTSESTAALGCLVKDYFPEPVTVSWNSGALTSG |
| | (wildtype) | VHTFPAVLQSSGLYSLSSVVTVPSSSLGTKTYTCNVDHKPSNTKVDKRV |
| 74 | IgG4 CH2 | APEFLGGPSVFLFPPKPKDTLMISRTPEVTCVVVDVSQEDPEVQFNWYV |
| | (wildtype) | DGVEVHNAKTKPREEQFNSTYRVVSVLTVLHQDWLNGKEYKCKVSNKGL |
| | (231-339 EU) | PSSIEKTISKAK |
| 75 | IgG4 CH3 | GQPREPQVYTLPPSQEEMTKNQVSLTCLVKGFYPSDIAVEWESNGQPEN |
| | (wildtype) | NYKTTPPVLDSDGSFFLYSRLTVDKSRWQEGNVFSCSVMHEALHNHYTQ |
| | (341-447 EU) | KSLSLSLGK |

HINGES

| | | |
|---|---|---|
| 76 | IgG1 hinge | EPKSCDKTHTCPPCP |
| | (216-230) | |
| 77 | IgG1 hinge | EPKSCDKTHTCPPSP |
| | (C229S) | |
| 78 | IgG1 hinge | EPKSCDKTHTSPPCP |
| | (C226S) | |
| 79 | IgG1 hinge | EPKSSDKTHTCPPCP |
| | (C220S) | |
| 80 | IgG1 hinge | EPKSSDKTHTCPPSP |
| | (C220S, | |
| | C229S) | |
| 81 | IgG1 hinge | EPKSCDKTHTSPPSP |
| | (C226S, | |
| | C229S) | |
| 82 | IgG1 hinge | EPKSSDKTHTSPPCP |
| | (C220S, | |
| | C226S) | |
| 83 | IgG1 hinge-Fc | EPKSSDKTHTSPPSP |
| | (C220S, | |
| | C226S, C229S) | |
| 84 | IgG1 short- | THTSPPSP |
| | hinge-Fc | |
| | (C226S, | |
| | C229S) | |
| 85 | IgG1 short- | THTCPPCP |
| | hinge-Fc | |
| 86 | IgG1 short- | THTSPPCP |
| | hinge-Fc | |
| | (C226S) | |
| 87 | IgG1 short- | THTCPPSP |
| | hinge-Fc | |
| | (C229S) | |
| 88 | IgG4 hinge- | ESKYGPPCPPCP |
| | Fc (S228P) | |
| 89 | Wildtype | ESKYGPPCPSCP |
| | hinge-IgG4 Fc | |
| | (216-230) | |
| 90 | Wildtype | ERKCCVECPPCP |
| | hinge-IgG2 Fc | |
| | (216-230) | |

Heavy chain constant domains (AST linker-CH1-hinge-CH2-CH3) with and
without terminal lysine residue
AST linker-CH1-hinge-CH2-CH3 without terminal K

| | | |
|---|---|---|
| 91 | TNX01 CH1- | ASTKGPSVFPLAPSSKSTSGGTAALGCLVKDYFPEPVTVSWNSGALTSG |
| | CH2-CH3 | VHTFPAVLQSSGLYSLSSVVTVPSSSLGTQTYICNVNHKPSNTKVDKKV |
| | IgG1(N297Q) | EPKSCDKTHTCPPCPAPELLGGPSVFLFPPKPKDTLMISRTPEVTCVVV |
| | | DVSHEDPEVKFNWYVDGVEVHNAKTKPREEQYQSTYRVVSVLTVLHQDW |
| | | LNGKEYKCKVSNKALPAPIEKTISKAKGQPREPQVYTLPPSRDELTKNQ |
| | | VSLTCLVKGFYPSDIAVEWESNGQPENNYKTTPPVLDSDGSFFLYSKLT |
| | | VDKSRWQQGNVFSCSVMHEALHNHYTQKSLSLSPG |
| 92 | TNX02 CH1- | ASTKGPSVFPLAPSSKSTSGGTAALGCLVKDYFPEPVTVSWNSGALTSG |
| | CH2-CH3 IgG1 | VHTFPAVLQSSGLYSLSSVVTVPSSSLGTQTYICNVNHKPSNTKVDKKV |
| | (wt) | EPKSCDKTHTCPPCPAPELLGGPSVFLFPPKPKDTLMISRTPEVTCVVV |
| | | DVSHEDPEVKFNWYVDGVEVHNAKTKPREEQYNSTYRVVSVLTVLHQDW |
| | | LNGKEYKCKVSNKALPAPIEKTISKAKGQPREPQVYTLPPSRDELTKNQ |
| | | VSLTCLVKGFYPSDIAVEWESNGQPENNYKTTPPVLDSDGSFFLYSKLT |
| | | VDKSRWQQGNVFSCSVMHEALHNHYTQKSLSLSPG |
| 93 | TNX03 CH1- | ASTKGPSVFPLAPSSKSTSGGTAALGCLVKDYFPEPVTVSWNSGALTSG |
| | CH2-CH3 | VHTFPAVLQSSGLYSLSSVVTVPSSSLGTQTYICNVNHKPSNTKVDKKV |
| | IgG1(N297G) | EPKSCDKTHTCPPCPAPELLGGPSVFLFPPKPKDTLMISRTPEVTCVVV |
| | | DVSHEDPEVKFNWYVDGVEVHNAKTKPREEQYGSTYRVVSVLTVLHQDW |
| | | LNGKEYKCKVSNKALPAPIEKTISKAKGQPREPQVYTLPPSRDELTKNQ |
| | | VSLTCLVKGFYPSDIAVEWESNGQPENNYKTTPPVLDSDGSFFLYSKLT |
| | | VDKSRWQQGNVFSCSVMHEALHNHYTQKSLSLSPG |
| 94 | TNX04 CH1- | ASTKGPSVFPLAPSSKSTSGGTAALGCLVKDYFPEPVTVSWNSGALTSG |
| | CH2-CH3 IgG1 | VHTFPAVLQSSGLYSLSSVVTVPSSSLGTQTYICNVNHKPSNTKVDKKV |
| | (C220S, | EPKSSDKTHTSPPSPAPELLGGSSVFLFPPKPKDTLMISRTPEVTCVVV |
| | C226S, C229S, | DVSHEDPEVKFNWYVDGVEVHNAKTKPREEQYNSTYRVVSVLTVLHQDW |
| | P238S) | LNGKEYKCKVSNKALPAPIEKTISKAKGQPREPQVYTLPPSRDELTKNQ |
| | | VSLTCLVKGFYPSDIAVEWESNGQPENNYKTTPPVLDSDGSFFLYSKLT |
| | | VDKSRWQQGNVFSCSVMHEALHNHYTQKSLSLSPG |
| 95 | TNX05 CH1- | ASTKGPSVFPLAPCSRSTSESTAALGCLVKDYFPEPVTVSWNSGALTSG |
| | CH2-CH3 IgG4 | VHTFPAVLQSSGLYSLSSVVTVPSSSLGTKTYTCNVDHKPSNTKVDKRV |
| | (S228P, | ESKYGPPCPPCPAPEFAGGPSVFLFPPKPKDTLMISRTPEVTCVVVDVS |
| | L235A) | QEDPEVQFNWYVDGVEVHNAKTKPREEQFNSTYRVVSVLTVLHQDWLNG |
| | | KEYKCKVSNKGLPSSIEKTISKAKGQPREPQVYTLPPSQEEMTKNQVSL |
| | | TCLVKGFYPSDIAVEWESNGQPENNYKTTPPVLDSDGSFFLYSRLTVDK |
| | | SRWQEGNVFSCSVMHEALHNHYTQKSLSLSLG |
| 96 | TNX06 CH1- | ASTKGPSVFPLAPCSRSTSESTAALGCLVKDYFPEPVTVSWNSGALTSG |
| | CH2-CH3 IgG4 | VHTFPAVLQSSGLYSLSSVVTVPSSSLGTKTYTCNVDHKPSNTKVDKRV |
| | Wild Type | ESKYGPPCPSCPAPEFLGGPSVFLFPPKPKDTLMISRTPEVTCVVVDVS |
| | | QEDPEVQFNWYVDGVEVHNAKTKPREEQFNSTYRVVSVLTVLHQDWLNG |
| | | KEYKCKVSNKGLPSSIEKTISKAKGQPREPQVYTLPPSQEEMTKNQVSL |
| | | TCLVKGFYPSDIAVEWESNGQPENNYKTTPPVLDSDGSFFLYSRLTVDK |
| | | SRWQEGNVFSCSVMHEALHNHYTQKSLSLSLG |
| 97 | CH1-CH2-CH3 | ASTKGPSVFPLAPCSRSTSESTAALGCLVKDYFPEPVTVSWNSGALTSG |
| | IgG2 Wild | VHTFPAVLQSSGLYSLSSWTVTSSNFGTQTYTCNVDHKPSNTKVDKTV |
| | Type | ERKCCVECPPCPAPPVAGPSVFLFPPKPKDTLMISRTPEVTCVVVDVSH |
| | | EDPEVQFNWYVDGMEVHNAKTKPREEQFNSTFRVVSVLTVVHQDWLNGK |
| | | EYKCKVSNKGLPAPIEKTISKTKGQPREPQVYTLPPSREEMTKNQVSLT |
| | | CLVKGFYPSDIAVEWESNGQPENNYKTTPPMLDSDGSFFLYSKLTVDKS |
| | | RWQQGNVFSCSVMHEALHNHYTQKSLSLSPG |
| 98 | CH1-CH2-CH3 | ASTKGPSVFPLAPSSKSTSGGTAALGCLVKDYFPEPVTVSWNSGALTSG |
| | IgG1 (ΔE216- | VHTFPAVLQSSGLYSLSSVVTVPSSSLGTQTYICNVNHKPSNTKVDKKV |
| | K222 IN | THTSPPSPAPELLGGSSVFLFPPKPKDTLMISRTPEVTCVVVDVSHEDP |
| | HINGE) | EVKFNWYVDGVEVHNAKTKPREEQYNSTYRVVSVLTVLHQDWLNGKEYK |
| | (C226S, | CKVSNKALPAPIEKTISKAKGQPREPQVYTLPPSRDELTKNQVSLTCLV |
| | C229S, P238S) | KGFYPSDIAVEWESNGQPENNYKTTPPVLDSDGSFFLYSKLTVDKSRWQ |
| | | QGNVFSCSVMHEALHNHYTQKSLSLSPG |
| 99 | CH1-CH2-CH3 | ASTKGPSVFPLAPSSKSTSGGTAALGCLVKDYFPEPVTVSWNSGALTSG |
| | IgG1 (C220S, | VHTFPAVLQSSGLYSLSSVVTVPSSSLGTQTYICNVNHKPSNTKVDKKV |
| | C226S, C229S, | EPKSSDKTHTSPPSPAPELLGGSSVFLFPPKPKDTLMISRTPEVTCVVV |
| | P238S, N297Q) | DVSHEDPEVKFNWYVDGVEVHNAKTKPREEQYQSTYRVVSVLTVLHQDW |
| | | LNGKEYKCKVSNKALPAPIEKTISKAKGQPREPQVYTLPPSRDELTKNQ |
| | | VSLTCLVKGFYPSDIAVEWESNGQPENNYKTTPPVLDSDGSFFLYSKLT |
| | | VDKSRWQQGNVFSCSVMHEALHNHYTQKSLSLSPG |
| 100 | CH1-CH2-CH3 | ASTKGPSVFPLAPSSKSTSGGTAALGCLVKDYFPEPVTVSWNSGALTSG |
| | IgG1 | VHTFPAVLQSSGLYSLSSVVTVPSSSLGTQTYICNVNHKPSNTKVDKKV |
| | (ΔE216-K222 | THTSPPSPAPELLGGSSVFLFPPKPKDTLMISRTPEVTCVVVDVSHEDP |
| | IN HINGE) | EVKFNWYVDGVEVHNAKTKPREEQYQSTYRVVSVLTVLHQDWLNGKEYK |
| | (C226S, | CKVSNKALPAPIEKTISKAKGQPREPQVYTLPPSRDELTKNQVSLTCLV |
| | C229S, P238S, | KGFYPSDIAVEWESNGQPENNYKTTPPVLDSDGSFFLYSKLTVDKSRWQ |
| | N297Q) | QGNVFSCSVMHEALHNHYTQKSLSLSPG |
| 101 | CH1-CH2-CH3 | ASTKGPSVFPLAPSSKSTSGGTAALGCLVKDYFPEPVTVSWNSGALTSG |
| | IgG1 | VHTFPAVLQSSGLYSLSSVVTVPSSSLGTQTYICNVNHKPSNTKVDKKV |
| | (C220S, | EPKSSDKTHTSPPSPAPELLGGSSVFLFPPKPKDTLMISRTPEVTCVVV |
| | C226S, C229S, | DVSHEDPEVKFNWYVDGVEVHNAKTKPREEQYGSTYRVVSVLTVLHQDW |
| | P238S, N297G) | LNGKEYKCKVSNKALPAPIEKTISKAKGQPREPQVYTLPPSRDELTKNQ |
| | | VSLTCLVKGFYPSDIAVEWESNGQPENNYKTTPPVLDSDGSFFLYSKLT |
| | | VDKSRWQQGNVFSCSVMHEALHNHYTQKSLSLSPG |
| 102 | CH1-CH2-CH3 | ASTKGPSVFPLAPSSKSTSGGTAALGCLVKDYFPEPVTVSWNSGALTSG |
| | IgG1 | VHTFPAVLQSSGLYSLSSVVTVPSSSLGTQTYICNVNHKPSNTKVDKKV |
| | (ΔE216-K222 | THTSPPSPAPELLGGSSVFLFPPKPKDTLMISRTPEVTCVVVDVSHEDP |
| | IN HINGE) | EVKFNWYVDGVEVHNAKTKPREEQYGSTYRVVSVLTVLHQDWLNGKEYK |
| | (C226S, | CKVSNKALPAPIEKTISKAKGQPREPQVYTLPPSRDELTKNQVSLTCLV |
| | C229S, P238S, | KGFYPSDIAVEWESNGQPENNYKTTPPVLDSDGSFFLYSKLTVDKSRWQ |
| | N297G) | QGNVFSCSVMHEALHNHYTQKSLSLSPG |
| 103 | TNX10 CH1- | ASTKGPSVFPLAPSSKSTSGGTAALGCLVKDYFPEPVTVSWNSGALTSG |
| | CH2-CH3 IgG1 | VHTFPAVLQSSGLYSLSSVVTVPSSSLGTQTYICNVNHKPSNTKVDKKV |
| | (L234A, | EPKSCDKTHTCPPCPAPEAAGGPSVFLFPPKPKDTLMISRTPEVTCVVV |
| | L235A) | DVSHEDPEVKFNWYVDGVEVHNAKTKPREEQYNSTYRVVSVLTVLHQDW |
| | | LNGKEYKCKVSNKALPAPIEKTISKAKGQPREPQVYTLPPSRDELTKNQ |
| | | VSLTCLVKGFYPSDIAVEWESNGQPENNYKTTPPVLDSDGSFFLYSKLT |
| | | VDKSRWQQGNVFSCSVMHEALHNHYTQKSLSLSPG |
| 104 | TNX11 CH1- | ASTKGPSVFPLAPSSKSTSGGTAALGCLVKDYFPEPVTVSWNSGALTSG |
| | CH2-CH3 IgG1 | VHTFPAVLQSSGLYSLSSVVTVPSSSLGTQTYICNVNHKPSNTKVDKKV |
| | (C226S, | EPKSCDKTHTSPPSPAPELLGGSSVFLFPPKPKDTLMISRTPEVTCVVV |
| | C229S, P238S) | DVSHEDPEVKFNWYVDGVEVHNAKTKPREEQYNSTYRVVSVLTVLHQDW |
| | | LNGKEYKCKVSNKALPAPIEKTISKAKGQPREPQVYTLPPSRDELTKNQ |
| | | VSLTCLVKGFYPSDIAVEWESNGQPENNYKTTPPVLDSDGSFFLYSKLT |
| | | VDKSRWQQGNVFSCSVMHEALHNHYTQKSLSLSPG |
| 254 | TNX07 CH1- | ASTKGPSVFPLAPCSRSTSESTAALGCLVKDYFPEPVTVSWNSGALTSG |
| | CH2-CH3 IgG4 | VHTFPAVLQSSGLYSLSSVVTVPSSSLGTKTYTCNVDHKPSNTKVDKRV |
| | (S228P) | ESKYGPPCPPCPAPEFLGGPSVFLFPPKPKDTLMISRTPEVTCVVVDVS |
| | | QEDPEVQFNWYVDGVEVHNAKTKPREEQFNSTYRVVSVLTVLHQDWLNG |
| | | KEYKCKVSNKGLPSSIEKTISKAKGQPREPQVYTLPPSQEEMTKNQVSL |
| | | TCLVKGFYPSDIAVEWESNGQPENNYKTTPPVLDSDGSFFLYSRLTVDK |
| | | SRWQEGNVFSCSVMHEALHNHYTQKSLSLSLG |
| 255 | TNX08 CH1- | ASTKGPSVFPLAPCSRSTSESTAALGCLVKDYFPEPVTVSWNSGALTSG |
| | CH2-CH3 IgG4 | VHTFPAVLQSSGLYSLSSVVTVPSSSLGTKTYTCNVDHKPSNTKVDKRV |
| | (S228P, | ESKYGPPCPPCPAPEFEGGPSVFLFPPKPKDTLMISRTPEVTCVVVDVS |
| | L235E) | QEDPEVQFNWYVDGVEVHNAKTKPREEQFNSTYRVVSVLTVLHQDWLNG |
| | | KEYKCKVSNKGLPSSIEKTISKAKGQPREPQVYTLPPSQEEMTKNQVSL |
| | | TCLVKGFYPSDIAVEWESNGQPENNYKTTPPVLDSDGSFFLYSRLTVDK |
| | | SRWQEGNVFSCSVMHEALHNHYTQKSLSLSLG |
| 256 | TNX09 CH1- | ASTKGPSVFPLAPCSRSTSESTAALGCLVKDYFPEPVTVSWNSGALTSG |
| | CH2-CH3 IgG4 | VHTFPAVLQSSGLYSLSSVVTVPSSSLGTKTYTCNVDHKPSNTKVDKRV |
| | (S228P, | ESKYGPPCPPCPAPEAAGGPSVFLFPPKPKDTLMISRTPEVTCVVVDVS |
| | F234A, L235A) | QEDPEVQFNWYVDGVEVHNAKTKPREEQFNSTYRVVSVLTVLHQDWLNG |
| | | KEYKCKVSNKGLPSSIEKTISKAKGQPREPQVYTLPPSQEEMTKNQVSL |
| | | TCLVKGFYPSDIAVEWESNGQPENNYKTTPPVLDSDGSFFLYSRLTVDK |
| | | SRWQEGNVFSCSVMHEALHNHYTQKSLSLSLG |
| 257 | TNX12 IgG1 | ASTKGPSVFPLAPSSKSTSGGTAALGCLVKDYFPEPVTVSWNSGALTSG |
| | CH1-CH2-CH3 | VHTFPAVLQSSGLYSLSSVVTVPSSSLGTQTYICNVNHKPSNTKVDKKV |
| | IgG1 (C229S, | EPKSCDKTHTCPPSPAPELLGGSSVFLFPPKPKDTLMISRTPEVTCVVV |
| | P238S) | DVSHEDPEVKFNWYVDGVEVHNAKTKPREEQYNSTYRVVSVLTVLHQDW |
| | | LNGKEYKCKVSNKALPAPIEKTISKAKGQPREPQVYTLPPSRDELTKNQ |
| | | VSLTCLVKGFYPSDIAVEWESNGQPENNYKTTPPVLDSDGSFFLYSKLT |
| | | VDKSRWQQGNVFSCSVMHEALHNHYTQKSLSLSPG |
| 258 | TNX13 IgG1 | ASTKGPSVFPLAPSSKSTSGGTAALGCLVKDYFPEPVTVSWNSGALTSG |
| | VH-CH1-CH2- | VHTFPAVLQSSGLYSLSSVVTVPSSSLGTQTYICNVNHKPSNTKVDKKV |
| | CH3 IgG1 | EPKSCDKTHTSPPCPAPELLGGSSVFLFPPKPKDTLMISRTPEVTCVVV |
| | (C226S, | DVSHEDPEVKFNWYVDGVEVHNAKTKPREEQYNSTYRVVSVLTVLHQDW |
| | P238S) | LNGKEYKCKVSNKALPAPIEKTISKAKGQPREPQVYTLPPSRDELTKNQ |
| | | VSLTCLVKGFYPSDIAVEWESNGQPENNYKTTPPVLDSDGSFFLYSKLT |
| | | VDKSRWQQGNVFSCSVMHEALHNHYTQKSLSLSPG |
| 259 | TNX14 VH-CH1- | ASTKGPSVFPLAPCSRSTSESTAALGCLVKDYFPEPVTVSWNSGALTSG |
| | CH2-CH3 IgG4 | VHTFPAVLQSSGLYSLSSVVTVPSSSLGTKTYTCNVDHKPSNTKVDKRV |
| | (L115T, | ESKYGPPCPPCPAPEFAGGPSVFLFPPKPKDTLMISRTPEVTCVVVDVS |
| | S228P, L235A) | QEDPEVQFNWYVDGVEVHNAKTKPREEQFNSTYRVVSVLTVLHQDWLNG |
| | | KEYKCKVSNKGLPSSIEKTISKAKGQPREPQVYTLPPSQEEMTKNQVSL |
| | | TCLVKGFYPSDIAVEWESNGQPENNYKTTPPVLDSDGSFFLYSRLTVDK |
| | | SRWQEGNVFSCSVMHEALHNHYTQKSLSLSLG |

AST linker-CH1-hinge-CH2-CH3 with terminal K

| | | |
|---|---|---|
| 105 | TNX01 CH1- | ASTKGPSVFPLAPSSKSTSGGTAALGCLVKDYFPEPVTVSWNSGALTSG |
| | CH2-CH3 | VHTFPAVLQSSGLYSLSSVVTVPSSSLGTQTYICNVNHKPSNTKVDKKV |
| | IgG1(N297Q) | EPKSCDKTHTCPPCPAPELLGGPSVFLFPPKPKDTLMISRTPEVTCVVV |
| | | DVSHEDPEVKFNWYVDGVEVHNAKTKPREEQYQSTYRVVSVLTVLHQDW |
| | | LNGKEYKCKVSNKALPAPIEKTISKAKGQPREPQVYTLPPSRDELTKNQ |
| | | VSLTCLVKGFYPSDIAVEWESNGQPENNYKTTPPVLDSDGSFFLYSKLT |
| | | VDKSRWQQGNVFSCSVMHEALHNHYTQKSLSLSPGK |
| 106 | TNX02 CH1- | ASTKGPSVFPLAPSSKSTSGGTAALGCLVKDYFPEPVTVSWNSGALTSG |
| | CH2-CH3 IgG1 | VHTFPAVLQSSGLYSLSSVVTVPSSSLGTQTYICNVNHKPSNTKVDKKV |
| | (wt) | EPKSCDKTHTCPPCPAPELLGGPSVFLFPPKPKDTLMISRTPEVTCVVV |
| | | DVSHEDPEVKFNWYVDGVEVHNAKTKPREEQYNSTYRVVSVLTVLHQDW |
| | | LNGKEYKCKVSNKALPAPIEKTISKAKGQPREPQVYTLPPSRDELTKNQ |
| | | VSLTCLVKGFYPSDIAVEWESNGQPENNYKTTPPVLDSDGSFFLYSKLT |
| | | VDKSRWQQGNVFSCSVMHEALHNHYTQKSLSLSPGK |
| 107 | TNX03 CH1- | ASTKGPSVFPLAPSSKSTSGGTAALGCLVKDYFPEPVTVSWNSGALTSG |
| | CH2-CH3 | VHTFPAVLQSSGLYSLSSVVTVPSSSLGTQTYICNVNHKPSNTKVDKKV |
| | IgG1(N297G) | EPKSCDKTHTCPPCPAPELLGGPSVFLFPPKPKDTLMISRTPEVTCVVV |
| | | DVSHEDPEVKFNWYVDGVEVHNAKTKPREEQYGSTYRVVSVLTVLHQDW |
| | | LNGKEYKCKVSNKALPAPIEKTISKAKGQPREPQVYTLPPSRDELTKNQ |
| | | VSLTCLVKGFYPSDIAVEWESNGQPENNYKTTPPVLDSDGSFFLYSKLT |
| | | VDKSRWQQGNVFSCSVMHEALHNHYTQKSLSLSPGK |
| 108 | TNX04 CH1- | ASTKGPSVFPLAPSSKSTSGGTAALGCLVKDYFPEPVTVSWNSGALTSG |
| | CH2-CH3 IgG1 | VHTFPAVLQSSGLYSLSSVVTVPSSSLGTQTYICNVNHKPSNTKVDKKV |
| | (C220S, | EPKSSDKTHTSPPSPAPELLGGSSVFLFPPKPKDTLMISRTPEVTCVVV |
| | C226S, C229S, | DVSHEDPEVKFNWYVDGVEVHNAKTKPREEQYNSTYRVVSVLTVLHQDW |
| | P238S) | LNGKEYKCKVSNKALPAPIEKTISKAKGQPREPQVYTLPPSRDELTKNQ |
| | | VSLTCLVKGFYPSDIAVEWESNGQPENNYKTTPPVLDSDGSFFLYSKLT |
| | | VDKSRWQQGNVFSCSVMHEALHNHYTQKSLSLSPGK |
| 109 | TNX05 CH1- | ASTKGPSVFPLAPCSRSTSESTAALGCLVKDYFPEPVTVSWNSGALTSG |
| | CH2-CH3 IgG4 | VHTFPAVLQSSGLYSLSSVVTVPSSSLGTKTYTCNVDHKPSNTKVDKRV |
| | (S228P, | ESKYGPPCPPCPAPEFAGGPSVFLFPPKPKDTLMISRTPEVTCVVVDVS |
| | L235A) | QEDPEVQFNWYVDGVEVHNAKTKPREEQFNSTYRVVSVLTVLHQDWLNG |
| | | KEYKCKVSNKGLPSSIEKTISKAKGQPREPQVYTLPPSQEEMTKNQVSL |
| | | TCLVKGFYPSDIAVEWESNGQPENNYKTTPPVLDSDGSFFLYSRLTVDK |
| | | SRWQEGNVFSCSVMHEALHNHYTQKSLSLSLGK |
| 110 | TNX06 CH1- | ASTKGPSVFPLAPCSRSTSESTAALGCLVKDYFPEPVTVSWNSGALTSG |
| | CH2-CH3 IgG4 | VHTFPAVLQSSGLYSLSSVVTVPSSSLGTKTYTCNVDHKPSNTKVDKRV |
| | Wild Type | ESKYGPPCPSCPAPEFLGGPSVFLFPPKPKDTLMISRTPEVTCVVVDVS |
| | | QEDPEVQFNWYVDGVEVHNAKTKPREEQFNSTYRVVSVLTVLHQDWLNG |
| | | KEYKCKVSNKGLPSSIEKTISKAKGQPREPQVYTLPPSQEEMTKNQVSL |
| | | TCLVKGFYPSDIAVEWESNGQPENNYKTTPPVLDSDGSFFLYSRLTVDK |
| | | SRWQEGNVFSCSVMHEALHNHYTQKSLSLSLGK |
| 111 | CH1-CH2-CH3 | ASTKGPSVFPLAPCSRSTSESTAALGCLVKDYFPEPVTVSWNSGALTSG |
| | IgG2 Wild | VHTFPAVLQSSGLYSLSSVVTVTSSNFGTQTYTCNVDHKPSNTKVDKTV |
| | Type | ERKCCVECPPCPAPPVAGPSVFLFPPKPKDTLMISRTPEVTCVVVDVSH |
| | | EDPEVQFNWYVDGMEVHNAKTKPREEQFNSTFRVVSVLTVVHQDWLNGK |
| | | EYKCKVSNKGLPAPIEKTISKTKGQPREPQVYTLPPSREEMTKNQVSLT |
| | | CLVKGFYPSDIAVEWESNGQPENNYKTTPPMLDSDGSFFLYSKLTVDKS |
| | | RWQQGNVFSCSVMHEALHNHYTQKSLSLSPGK |
| 112 | CH1-CH2-CH3 | ASTKGPSVFPLAPSSKSTSGGTAALGCLVKDYFPEPVTVSWNSGALTSG |
| | IgG1 (ΔE216- | VHTFPAVLQSSGLYSLSSVVTVPSSSLGTQTYICNVNHKPSNTKVDKKV |
| | K222 IN | THTSPPSPAPELLGGSSVFLFPPKPKDTLMISRTPEVTCVVVDVSHEDP |
| | HINGE) | EVKFNWYVDGVEVHNAKTKPREEQYNSTYRVVSVLTVLHQDWLNGKEYK |
| | (C226S, | CKVSNKALPAPIEKTISKAKGQPREPQVYTLPPSRDELTKNQVSLTCLV |
| | C229S, P238S) | KGFYPSDIAVEWESNGQPENNYKTTPPVLDSDGSFFLYSKLTVDKSRWQ |
| | | QGNVFSCSVMHEALHNHYTQKSLSLSPGK |
| 113 | CH1-CH2-CH3 | ASTKGPSVFPLAPSSKSTSGGTAALGCLVKDYFPEPVTVSWNSGALTSG |
| | IgG1 (C220S, | VHTFPAVLQSSGLYSLSSVVTVPSSSLGTQTYICNVNHKPSNTKVDKKV |
| | C226S, C229S, | EPKSSDKTHTSPPSPAPELLGGSSVFLFPPKPKDTLMISRTPEVTCVVV |
| | P238S, N297Q) | DVSHEDPEVKFNWYVDGVEVHNAKTKPREEQYQSTYRVVSVLTVLHQDW |
| | | LNGKEYKCKVSNKALPAPIEKTISKAKGQPREPQVYTLPPSRDELTKNQ |
| | | VSLTCLVKGFYPSDIAVEWESNGQPENNYKTTPPVLDSDGSFFLYSKLT |
| | | VDKSRWQQGNVFSCSVMHEALHNHYTQKSLSLSPGK |
| 114 | CH1-CH2-CH3 | ASTKGPSVFPLAPSSKSTSGGTAALGCLVKDYFPEPVTVSWNSGALTSG |
| | IgG1 | VHTFPAVLQSSGLYSLSSVVTVPSSSLGTQTYICNVNHKPSNTKVDKKV |
| | (ΔE216-K222 | THTSPPSPAPELLGGSSVFLFPPKPKDTLMISRTPEVTCVVVDVSHEDP |
| | IN HINGE) | EVKFNWYVDGVEVHNAKTKPREEQYQSTYRVVSVLTVLHQDWLNGKEYK |
| | (C226S, | CKVSNKALPAPIEKTISKAKGQPREPQVYTLPPSRDELTKNQVSLTCLV |
| | C229S, P238S, | KGFYPSDIAVEWESNGQPENNYKTTPPVLDSDGSFFLYSKLTVDKSRWQ |
| | N297Q) | QGNVFSCSVMHEALHNHYTQKSLSLSPG |
| 115 | CH1-CH2-CH3 | ASTKGPSVFPLAPSSKSTSGGTAALGCLVKDYFPEPVTVSWNSGALTSG |
| | IgG1 | VHTFPAVLQSSGLYSLSSVVTVPSSSLGTQTYICNVNHKPSNTKVDKKV |
| | (C220S, | EPKSSDKTHTSPPSPAPELLGGSSVFLFPPKPKDTLMISRTPEVTCVVV |
| | C226S, C229S, | DVSHEDPEVKFNWYVDGVEVHNAKTKPREEQYGSTYRVVSVLTVLHQDW |
| | P238S, N297G) | LNGKEYKCKVSNKALPAPIEKTISKAKGQPREPQVYTLPPSRDELTKNQ |
| | | VSLTCLVKGFYPSDIAVEWESNGQPENNYKTTPPVLDSDGSFFLYSKLT |
| | | VDKSRWQQGNVFSCSVMHEALHNHYTQKSLSLSPGK |
| 116 | CH1-CH2-CH3 | ASTKGPSVFPLAPSSKSTSGGTAALGCLVKDYFPEPVTVSWNSGALTSG |
| | IgG1 | VHTFPAVLQSSGLYSLSSVVTVPSSSLGTQTYICNVNHKPSNTKVDKKV |
| | (ΔE216-K222 | THTSPPSPAPELLGGSSVFLFPPKPKDTLMISRTPEVTCVVVDVSHEDP |
| | IN HINGE) | EVKFNWYVDGVEVHNAKTKPREEQYGSTYRVVSVLTVLHQDWLNGKEYK |
| | (C226S, | CKVSNKALPAPIEKTISKAKGQPREPQVYTLPPSRDELTKNQVSLTCLV |
| | C229S, P238S, | KGFYPSDIAVEWESNGQPENNYKTTPPVLDSDGSFFLYSKLTVDKSRWQ |
| | N297G) | QGNVFSCSVMHEALHNHYTQKSLSLSPGK |
| 117 | TNX10 CH1- | ASTKGPSVFPLAPSSKSTSGGTAALGCLVKDYFPEPVTVSWNSGALTSG |
| | CH2-CH3 IgG1 | VHTFPAVLQSSGLYSLSSVVTVPSSSLGTQTYICNVNHKPSNTKVDKKV |
| | (L234A, | EPKSCDKTHTCPPCPAPEAAGGPSVFLFPPKPKDTLMISRTPEVTCVVV |
| | L235A) | DVSHEDPEVKFNWYVDGVEVHNAKTKPREEQYNSTYRVVSVLTVLHQDW |
| | | LNGKEYKCKVSNKALPAPIEKTISKAKGQPREPQVYTLPPSRDELTKNQ |
| | | VSLTCLVKGFYPSDIAVEWESNGQPENNYKTTPPVLDSDGSFFLYSKLT |
| | | VDKSRWQQGNVFSCSVMHEALHNHYTQKSLSLSPGK |
| 118 | TNX11 CH1- | ASTKGPSVFPLAPSSKSTSGGTAALGCLVKDYFPEPVTVSWNSGALTSG |
| | CH2-CH3 IgG1 | VHTFPAVLQSSGLYSLSSVVTVPSSSLGTQTYICNVNHKPSNTKVDKKV |
| | (C226S, | EPKSCDKTHTSPPSPAPELLGGSSVFLFPPKPKDTLMISRTPEVTCVVV |
| | C229S, P238S) | DVSHEDPEVKFNWYVDGVEVHNAKTKPREEQYNSTYRVVSVLTVLHQDW |
| | | LNGKEYKCKVSNKALPAPIEKTISKAKGQPREPQVYTLPPSRDELTKNQ |
| | | VSLTCLVKGFYPSDIAVEWESNGQPENNYKTTPPVLDSDGSFFLYSKLT |
| | | VDKSRWQQGNVFSCSVMHEALHNHYTQKSLSLSPGK |
| 260 | TNX07 CH1- | ASTKGPSVFPLAPCSRSTSESTAALGCLVKDYFPEPVTVSWNSGALTSG |
| | CH2-CH3 IgG4 | VHTFPAVLQSSGLYSLSSVVTVPSSSLGTKTYTCNVDHKPSNTKVDKRV |
| | (S228P) | ESKYGPPCPPCPAPEFLGGPSVFLFPPKPKDTLMISRTPEVTCVVVDVS |
| | | QEDPEVQFNWYVDGVEVHNAKTKPREEQFNSTYRVVSVLTVLHQDWLNG |
| | | KEYKCKVSNKGLPSSIEKTISKAKGQPREPQVYTLPPSQEEMTKNQVSL |
| | | TCLVKGFYPSDIAVEWESNGQPENNYKTTPPVLDSDGSFFLYSRLTVDK |
| | | SRWQEGNVFSCSVMHEALHNHYTQKSLSLSLGK |
| 261 | TNX08 CH1- | ASTKGPSVFPLAPCSRSTSESTAALGCLVKDYFPEPVTVSWNSGALTSG |
| | CH2-CH3 IgG4 | VHTFPAVLQSSGLYSLSSVVTVPSSSLGTKTYTCNVDHKPSNTKVDKRV |
| | (S228P, | ESKYGPPCPPCPAPEFEGGPSVFLFPPKPKDTLMISRTPEVTCVVVDVS |
| | L235E) | QEDPEVQFNWYVDGVEVHNAKTKPREEQFNSTYRVVSVLTVLHQDWLNG |
| | | KEYKCKVSNKGLPSSIEKTISKAKGQPREPQVYTLPPSQEEMTKNQVSL |
| | | TCLVKGFYPSDIAVEWESNGQPENNYKTTPPVLDSDGSFFLYSRLTVDK |
| | | SRWQEGNVFSCSVMHEALHNHYTQKSLSLSLGK |
| 262 | TNX09 CH1- | ASTKGPSVFPLAPCSRSTSESTAALGCLVKDYFPEPVTVSWNSGALTSG |
| | CH2-CH3 IgG4 | VHTFPAVLQSSGLYSLSSVVTVPSSSLGTKTYTCNVDHKPSNTKVDKRV |
| | (S228P, | ESKYGPPCPPCPAPEAAGGPSVFLFPPKPKDTLMISRTPEVTCVVVDVS |
| | F234A, L235A) | QEDPEVQFNWYVDGVEVHNAKTKPREEQFNSTYRVVSVLTVLHQDWLNG |
| | | KEYKCKVSNKGLPSSIEKTISKAKGQPREPQVYTLPPSQEEMTKNQVSL |
| | | TCLVKGFYPSDIAVEWESNGQPENNYKTTPPVLDSDGSFFLYSRLTVDK |
| | | SRWQEGNVFSCSVMHEALHNHYTQKSLSLSLGK |
| 263 | TNX12 IgG1 | ASTKGPSVFPLAPSSKSTSGGTAALGCLVKDYFPEPVTVSWNSGALTSG |
| | CH1-CH2-CH3 | VHTFPAVLQSSGLYSLSSVVTVPSSSLGTQTYICNVNHKPSNTKVDKKV |
| | IgG1 (C229S, | EPKSCDKTHTCPPSPAPELLGGSSVFLFPPKPKDTLMISRTPEVTCVVV |
| | P238S) | DVSHEDPEVKFNWYVDGVEVHNAKTKPREEQYNSTYRVVSVLTVLHQDW |
| | | LNGKEYKCKVSNKALPAPIEKTISKAKGQPREPQVYTLPPSRDELTKNQ |
| | | VSLTCLVKGFYPSDIAVEWESNGQPENNYKTTPPVLDSDGSFFLYSKLT |
| | | VDKSRWQQGNVFSCSVMHEALHNHYTQKSLSLSPGK |
| 264 | TNX13 IgG1 | ASTKGPSVFPLAPSSKSTSGGTAALGCLVKDYFPEPVTVSWNSGALTSG |
| | VH-CH1-CH2- | VHTFPAVLQSSGLYSLSSVVTVPSSSLGTQTYICNVNHKPSNTKVDKKV |
| | CH3 IgG1 | EPKSCDKTHTSPPCPAPELLGGSSVFLFPPKPKDTLMISRTPEVTCVVV |
| | (C226S, | DVSHEDPEVKFNWYVDGVEVHNAKTKPREEQYNSTYRVVSVLTVLHQDW |
| | P238S) | LNGKEYKCKVSNKALPAPIEKTISKAKGQPREPQVYTLPPSRDELTKNQ |
| | | VSLTCLVKGFYPSDIAVEWESNGQPENNYKTTPPVLDSDGSFFLYSKLT |
| | | VDKSRWQQGNVFSCSVMHEALHNHYTQKSLSLSPGK |
| 265 | TNX14 VH-CH1- | ASTKGPSVFPLAPCSRSTSESTAALGCLVKDYFPEPVTVSWNSGALTSG |
| | CH2-CH3 IgG4 | VHTFPAVLQSSGLYSLSSVVTVPSSSLGTKTYTCNVDHKPSNTKVDKRV |
| | (L115T, | ESKYGPPCPPCPAPEFAGGPSVFLFPPKPKDTLMISRTPEVTCVVVDVS |
| | S228P, L235A) | QEDPEVQFNWYVDGVEVHNAKTKPREEQFNSTYRVVSVLTVLHQDWLNG |
| | | KEYKCKVSNKGLPSSIEKTISKAKGQPREPQVYTLPPSQEEMTKNQVSL |
| | | TCLVKGFYPSDIAVEWESNGQPENNYKTTPPVLDSDGSFFLYSRLTVDK |
| | | SRWQEGNVFSCSVMHEALHNHYTQKSLSLSLGK |

Full length heavy chain with and without leader; with and without
terminal lysine residue
Heavy chain full length sequences with leader and no terminal K

| | | |
|---|---|---|
| 119 | TNX01 VH-CH1- | MPLLLLLPLLWAGALAQVQLVQSGAEVVKPGASVKLSCKASGYIFTSYY |
| | CH2-CH3 | MYWVKQAPGQGLEWIGEINPSNGDTNFNEKFKSKATLTVDKSASTAYME |
| | IgG1(N297Q) | LSSLRSEDTAVYYCTRSDGRNDMDSWGQGTLVTVSSASTKGPSVFPLAP |
| | | SSKSTSGGTAALGCLVKDYFPEPVTVSWNSGALTSGVHTFPAVLQSSGL |
| | | YSLSSVVTVPSSSLGTQTYICNVNHKPSNTKVDKKVEPKSCDKTHTCPP |
| | | CPAPELLGGPSVFLFPPKPKDTLMISRTPEVTCVVVDVSHEDPEVKFNW |
| | | YVDGVEVHNAKTKPREEQYQSTYRVVSVLTVLHQDWLNGKEYKCKVSNK |
| | | ALPAPIEKTISKAKGQPREPQVYTLPPSRDELTKNQVSLTCLVKGFYPS |
| | | DIAVEWESNGQPENNYKTTPPVLDSDGSFFLYSKLTVDKSRWQQGNVFS |
| | | CSVMHEALHNHYTQKSLSLSPG |
| 120 | TNX02 VH-CH1- | MPLLLLLPLLWAGALAQVQLVQSGAEVVKPGASVKLSCKASGYIFTSYY |
| | CH2-CH3 IgG1 | MYWVKQAPGQGLEWIGEINPSNGDTNFNEKFKSKATLTVDKSASTAYME |
| | (wt) | LSSLRSEDTAVYYCTRSDGRNDMDSWGQGTLVTVSSASTKGPSVFPLAP |
| | | SSKSTSGGTAALGCLVKDYFPEPVTVSWNSGALTSGVHTFPAVLQSSGL |
| | | YSLSSVVTVPSSSLGTQTYICNVNHKPSNTKVDKKVEPKSCDKTHTCPP |
| | | CPAPELLGGPSVFLFPPKPKDTLMISRTPEVTCVVVDVSHEDPEVKFNW |
| | | YVDGVEVHNAKTKPREEQYNSTYRVVSVLTVLHQDWLNGKEYKCKVSNK |
| | | ALPAPIEKTISKAKGQPREPQVYTLPPSRDELTKNQVSLTCLVKGFYPS |
| | | DIAVEWESNGQPENNYKTTPPVLDSDGSFFLYSKLTVDKSRWQQGNVFS |
| | | CSVMHEALHNHYTQKSLSLSPG |
| 121 | TNX03 VH-CH1- | MPLLLLLPLLWAGALAQVQLVQSGAEVVKPGASVKLSCKASGYIFTSYY |
| | CH2-CH3 | MYWVKQAPGQGLEWIGEINPSNGDTNFNEKFKSKATLTVDKSASTAYME |
| | IgG1(N297G) | LSSLRSEDTAVYYCTRSDGRNDMDSWGQGTLVTVSSASTKGPSVFPLAP |
| | | SSKSTSGGTAALGCLVKDYFPEPVTVSWNSGALTSGVHTFPAVLQSSGL |
| | | YSLSSVVTVPSSSLGTQTYICNVNHKPSNTKVDKKVEPKSCDKTHTCPP |
| | | CPAPELLGGPSVFLFPPKPKDTLMISRTPEVTCVVVDVSHEDPEVKFNW |
| | | YVDGVEVHNAKTKPREEQYGSTYRVVSVLTVLHQDWLNGKEYKCKVSNK |
| | | ALPAPIEKTISKAKGQPREPQVYTLPPSRDELTKNQVSLTCLVKGFYPS |
| | | DIAVEWESNGQPENNYKTTPPVLDSDGSFFLYSKLTVDKSRWQQGNVFS |
| | | CSVMHEALHNHYTQKSLSLSPG |
| 122 | TNX04 VH-CH1- | MPLLLLLPLLWAGALAQVQLVQSGAEVVKPGASVKLSCKASGYIFTSYY |
| | CH2-CH3 IgG1 | MYWVKQAPGQGLEWIGEINPSNGDTNFNEKFKSKATLTVDKSASTAYME |
| | (C220S, | LSSLRSEDTAVYYCTRSDGRNDMDSWGQGTLVTVSSASTKGPSVFPLAP |
| | C226S, C229S, | SSKSTSGGTAALGCLVKDYFPEPVTVSWNSGALTSGVHTFPAVLQSSGL |
| | P238S) | YSLSSVVTVPSSSLGTQTYICNVNHKPSNTKVDKKVEPKSSDKTHTSPP |
| | | SPAPELLGGSSVFLFPPKPKDTLMISRTPEVTCVVVDVSHEDPEVKFNW |
| | | YVDGVEVHNAKTKPREEQYNSTYRVVSVLTVLHQDWLNGKEYKCKVSNK |
| | | ALPAPIEKTISKAKGQPREPQVYTLPPSRDELTKNQVSLTCLVKGFYPS |
| | | DIAVEWESNGQPENNYKTTPPVLDSDGSFFLYSKLTVDKSRWQQGNVFS |
| | | CSVMHEALHNHYTQKSLSLSPG |
| 123 | TNX05 VH-CH1- | MPLLLLLPLLWAGALAQVQLVQSGAEVVKPGASVKLSCKASGYIFTSYY |
| | CH2-CH3 IgG4 | MYWVKQAPGQGLEWIGEINPSNGDTNFNEKFKSKATLTVDKSASTAYME |
| | (S228P, | LSSLRSEDTAVYYCTRSDGRNDMDSWGQGTLVTVSSASTKGPSVFPLAP |
| | L235A) | CSRSTSESTAALGCLVKDYFPEPVTVSWNSGALTSGVHTFPAVLQSSGL |
| | | YSLSSVVTVPSSSLGTKTYTCNVDHKPSNTKVDKRVESKYGPPCPPCPA |
| | | PEFAGGPSVFLFPPKPKDTLMISRTPEVTCVVVDVSQEDPEVQFNWYVD |
| | | GVEVHNAKTKPREEQFNSTYRVVSVLTVLHQDWLNGKEYKCKVSNKGLP |
| | | SSIEKTISKAKGQPREPQVYTLPPSQEEMTKNQVSLTCLVKGFYPSDIA |
| | | VEWESNGQPENNYKTTPPVLDSDGSFFLYSRLTVDKSRWQEGNVFSCSV |
| | | MHEALHNHYTQKSLSLSLG |
| 124 | TNX06 VH-CH1- | MPLLLLLPLLWAGALAQVQLVQSGAEVVKPGASVKLSCKASGYIFTSYY |
| | CH2-CH3 IgG4 | MYWVKQAPGQGLEWIGEINPSNGDTNFNEKFKSKATLTVDKSASTAYME |
| | Wild Type | LSSLRSEDTAVYYCTRSDGRNDMDSWGQGTLVTVSSASTKGPSVFPLAP |
| | | CSRSTSESTAALGCLVKDYFPEPVTVSWNSGALTSGVHTFPAVLQSSGL |
| | | YSLSSVVTVPSSSLGTKTYTCNVDHKPSNTKVDKRVESKYGPPCPSCPA |
| | | PEFLGGPSVFLFPPKPKDTLMISRTPEVTCVVVDVSQEDPEVQFNWYVD |
| | | GVEVHNAKTKPREEQFNSTYRVVSVLTVLHQDWLNGKEYKCKVSNKGLP |
| | | SSIEKTISKAKGQPREPQVYTLPPSQEEMTKNQVSLTCLVKGFYPSDIA |
| | | VEWESNGQPENNYKTTPPVLDSDGSFFLYSRLTVDKSRWQEGNVFSCSV |
| | | MHEALHNHYTQKSLSLSLG |
| 125 | VH-CH1-CH2- | MPLLLLLPLLWAGALAQVQLVQSGAEVVKPGASVKLSCKASGYIFTSYY |
| | CH3 IgG2 Wild | MYWVKQAPGQGLEWIGEINPSNGDTNFNEKFKSKATLTVDKSASTAYME |
| | Type | LSSLRSEDTAVYYCTRSDGRNDMDSWGQGTLVTVSSASTKGPSVFPLAP |
| | | CSRSTSESTAALGCLVKDYFPEPVTVSWNSGALTSGVHTFPAVLQSSGL |
| | | YSLSSVVTVTSSNFGTQTYTCNVDHKPSNTKVDKTVERKCCVECPPCPA |
| | | PPVAGPSVFLFPPKPKDTLMISRTPEVTCVVVDVSHEDPEVQFNWYVDG |
| | | MEVHNAKTKPREEQFNSTFRVVSVLTWHQDWLNGKEYKCKVSNKGLPA |
| | | PIEKTISKTKGQPREPQVYTLPPSREEMTKNQVSLTCLVKGFYPSDIAV |
| | | EWESNGQPENNYKTTPPMLDSDGSFFLYSKLTVDKSRWQQGNVFSCSVM |
| | | HEALHNHYTQKSLSLSPG |
| 126 | VH-CH1-CH2- | MPLLLLLPLLWAGALAQVQLVQSGAEVVKPGASVKLSCKASGYIFTSYY |
| | CH3 IgG1 | MYWVKQAPGQGLEWIGEINPSNGDTNFNEKFKSKATLTVDKSASTAYME |
| | (ΔE216-K222 | LSSLRSEDTAVYYCTRSDGRNDMDSWGQGTLVTVSSASTKGPSVFPLAP |
| | IN HINGE) | SSKSTSGGTAALGCLVKDYFPEPVTVSWNSGALTSGVHTFPAVLQSSGL |
| | (C226S, | YSLSSVVTVPSSSLGTQTYICNVNHKPSNTKVDKKVTHTSPPSPAPELL |
| | C229S, P238S) | GGSSVFLFPPKPKDTLMISRTPEVTCVVVDVSHEDPEVKFNWYVDGVEV |
| | | HNAKTKPREEQYNSTYRVVSVLTVLHQDWLNGKEYKCKVSNKALPAPIE |
| | | KTISKAKGQPREPQVYTLPPSRDELTKNQVSLTCLVKGFYPSDIAVEWE |
| | | SNGQPENNYKTTPPVLDSDGSFFLYSKLTVDKSRWQQGNVFSCSVMHEA |
| | | LHNHYTQKSLSLSPG |
| 127 | VH-CH1-CH2- | MPLLLLLPLLWAGALAQVQLVQSGAEVVKPGASVKLSCKASGYIFTSYY |
| | CH3 IgG1 | MYWVKQAPGQGLEWIGEINPSNGDTNFNEKFKSKATLTVDKSASTAYME |
| | (C220S, | LSSLRSEDTAVYYCTRSDGRNDMDSWGQGTLVTVSSASTKGPSVFPLAP |
| | C226S, C229S, | SSKSTSGGTAALGCLVKDYFPEPVTVSWNSGALTSGVHTFPAVLQSSGL |
| | P238S, N297Q) | YSLSSVVTVPSSSLGTQTYICNVNHKPSNTKVDKKVEPKSSDKTHTSPP |
| | | SPAPELLGGSSVFLFPPKPKDTLMISRTPEVTCVVVDVSHEDPEVKFNW |
| | | YVDGVEVHNAKTKPREEQYQSTYRVVSVLTVLHQDWLNGKEYKCKVSNK |
| | | ALPAPIEKTISKAKGQPREPQVYTLPPSRDELTKNQVSLTCLVKGFYPS |
| | | DIAVEWESNGQPENNYKTTPPVLDSDGSFFLYSKLTVDKSRWQQGNVFS |
| | | CSVMHEALHNHYTQKSLSLSPG |
| 128 | VH-CH1-CH2- | MPLLLLLPLLWAGALAQVQLVQSGAEVVKPGASVKLSCKASGYIFTSYY |
| | CH3 IgG1 | MYWVKQAPGQGLEWIGEINPSNGDTNFNEKFKSKATLTVDKSASTAYME |
| | (ΔE216-K222 | LSSLRSEDTAVYYCTRSDGRNDMDSWGQGTLVTVSSASTKGPSVFPLAP |
| | IN HINGE) | SSKSTSGGTAALGCLVKDYFPEPVTVSWNSGALTSGVHTFPAVLQSSGL |
| | (C226S, | YSLSSVVTVPSSSLGTQTYICNVNHKPSNTKVDKKVTHTSPPSPAPELL |
| | C229S, P238S, | GGSSVFLFPPKPKDTLMISRTPEVTCVVVDVSHEDPEVKFNWYVDGVEV |
| | N297Q) | HNAKTKPREEQYQSTYRVVSVLTVLHQDWLNGKEYKCKVSNKALPAPIE |
| | | KTISKAKGQPREPQVYTLPPSRDELTKNQVSLTCLVKGFYPSDIAVEWE |
| | | SNGQPENNYKTTPPVLDSDGSFFLYSKLTVDKSRWQQGNVFSCSVMHEA |
| | | LHNHYTQKSLSLSPG |
| 129 | VH-CH1-CH2- | MPLLLLLPLLWAGALAQVQLVQSGAEVVKPGASVKLSCKASGYIFTSYY |
| | CH3 IgG1 | MYWVKQAPGQGLEWIGEINPSNGDTNFNEKFKSKATLTVDKSASTAYME |
| | (C220S, | LSSLRSEDTAVYYCTRSDGRNDMDSWGQGTLVTVSSASTKGPSVFPLAP |
| | C226S, C229S, | SSKSTSGGTAALGCLVKDYFPEPVTVSWNSGALTSGVHTFPAVLQSSGL |
| | P238S, N297G) | YSLSSVVTVPSSSLGTQTYICNVNHKPSNTKVDKKVEPKSSDKTHTSPP |
| | | SPAPELLGGSSVFLFPPKPKDTLMISRTPEVTCVVVDVSHEDPEVKFNW |
| | | YVDGVEVHNAKTKPREEQYGSTYRVVSVLTVLHQDWLNGKEYKCKVSNK |
| | | ALPAPIEKTISKAKGQPREPQVYTLPPSRDELTKNQVSLTCLVKGFYPS |
| | | DIAVEWESNGQPENNYKTTPPVLDSDGSFFLYSKLTVDKSRWQQGNVFS |
| | | CSVMHEALHNHYTQKSLSLSPG |
| 130 | VH-CH1-CH2- | MPLLLLLPLLWAGALAQVQLVQSGAEVVKPGASVKLSCKASGYIFTSYY |
| | CH3 IgG1 | MYWVKQAPGQGLEWIGEINPSNGDTNFNEKFKSKATLTVDKSASTAYME |
| | (ΔE216-K222 | LSSLRSEDTAVYYCTRSDGRNDMDSWGQGTLVTVSSASTKGPSVFPLAP |
| | IN HINGE) | SSKSTSGGTAALGCLVKDYFPEPVTVSWNSGALTSGVHTFPAVLQSSGL |
| | (C226S, | YSLSSVVTVPSSSLGTQTYICNVNHKPSNTKVDKKVTHTSPPSPAPELL |
| | C229S, P238S, | GGSSVFLFPPKPKDTLMISRTPEVTCVVVDVSHEDPEVKFNWYVDGVEV |
| | N297G) | HNAKTKPREEQYGSTYRVVSVLTVLHQDWLNGKEYKCKVSNKALPAPIE |
| | | KTISKAKGQPREPQVYTLPPSRDELTKNQVSLTCLVKGFYPSDIAVEWE |
| | | SNGQPENNYKTTPPVLDSDGSFFLYSKLTVDKSRWQQGNVFSCSVMHEA |
| | | LHNHYTQKSLSLSPG |
| 131 | TNX10 VH-CH1- | MPLLLLLPLLWAGALAQVQLVQSGAEVVKPGASVKLSCKASGYIFTSYY |
| | CH2-CH3 IgG1 | MYWVKQAPGQGLEWIGEINPSNGDTNFNEKFKSKATLTVDKSASTAYME |
| | (L234A, | LSSLRSEDTAVYYCTRSDGRNDMDSWGQGTLVTVSSASTKGPSVFPLAP |
| | L235A) | SSKSTSGGTAALGCLVKDYFPEPVTVSWNSGALTSGVHTFPAVLQSSGL |
| | | YSLSSVVTVPSSSLGTQTYICNVNHKPSNTKVDKKVEPKSCDKTHTCPP |
| | | CPAPEAAGGPSVFLFPPKPKDTLMISRTPEVTCVVVDVSHEDPEVKFNW |
| | | YVDGVEVHNAKTKPREEQYNSTYRVVSVLTVLHQDWLNGKEYKCKVSNK |
| | | ALPAPIEKTISKAKGQPREPQVYTLPPSRDELTKNQVSLTCLVKGFYPS |
| | | DIAVEWESNGQPENNYKTTPPVLDSDGSFFLYSKLTVDKSRWQQGNVFS |
| | | CSVMHEALHNHYTQKSLSLSPG |
| 132 | TNX11 VH-CH1- | MPLLLLLPLLWAGALAQVQLVQSGAEVVKPGASVKLSCKASGYIFTSYY |
| | CH2-CH3 IgG1 | MYWVKQAPGQGLEWIGEINPSNGDTNFNEKFKSKATLTVDKSASTAYME |
| | (C226S, | LSSLRSEDTAVYYCTRSDGRNDMDSWGQGTLVTVSSASTKGPSVFPLAP |
| | C229S, P238S) | SSKSTSGGTAALGCLVKDYFPEPVTVSWNSGALTSGVHTFPAVLQSSGL |
| | | YSLSSVVTVPSSSLGTQTYICNVNHKPSNTKVDKKVEPKSCDKTHTSPP |
| | | SPAPELLGGSSVFLFPPKPKDTLMISRTPEVTCVVVDVSHEDPEVKFNW |
| | | YVDGVEVHNAKTKPREEQYNSTYRVVSVLTVLHQDWLNGKEYKCKVSNK |
| | | ALPAPIEKTISKAKGQPREPQVYTLPPSRDELTKNQVSLTCLVKGFYPS |
| | | DIAVEWESNGQPENNYKTTPPVLDSDGSFFLYSKLTVDKSRWQQGNVFS |
| | | CSVMHEALHNHYTQKSLSLSPG |
| 266 | TNX07 VH-CH1- | MPLLLLLPLLWAGALAQVQLVQSGAEVVKPGASVKLSCKASGYIFTSYY |
| | CH2-CH3 IgG4 | MYWVKQAPGQGLEWIGEINPSNGDTNFNEKFKSKATLTVDKSASTAYME |
| | (S228P) | LSSLRSEDTAVYYCTRSDGRNDMDSWGQGTLVTVSSASTKGPSVFPLAP |
| | | CSRSTSESTAALGCLVKDYFPEPVTVSWNSGALTSGVHTFPAVLQSSGL |
| | | YSLSSVVTVPSSSLGTKTYTCNVDHKPSNTKVDKRVESKYGPPCPPCPA |
| | | PEFLGGPSVFLFPPKPKDTLMISRTPEVTCVVVDVSQEDPEVQFNWYVD |
| | | GVEVHNAKTKPREEQFNSTYRVVSVLTVLHQDWLNGKEYKCKVSNKGLP |
| | | SSIEKTISKAKGQPREPQVYTLPPSQEEMTKNQVSLTCLVKGFYPSDIA |
| | | VEWESNGQPENNYKTTPPVLDSDGSFFLYSRLTVDKSRWQEGNVFSCSV |
| | | MHEALHNHYTQKSLSLSLG |
| 267 | TNX08 VH-CH1- | MPLLLLLPLLWAGALAQVQLVQSGAEVVKPGASVKLSCKASGYIFTSYY |
| | CH2-CH3 IgG4 | MYWVKQAPGQGLEWIGEINPSNGDTNFNEKFKSKATLTVDKSASTAYME |
| | (S228P, | LSSLRSEDTAVYYCTRSDGRNDMDSWGQGTLVTVSSASTKGPSVFPLAP |
| | L235E) | CSRSTSESTAALGCLVKDYFPEPVTVSWNSGALTSGVHTFPAVLQSSGL |
| | | YSLSSVVTVPSSSLGTKTYTCNVDHKPSNTKVDKRVESKYGPPCPPCPA |
| | | PEFEGGPSVFLFPPKPKDTLMISRTPEVTCVVVDVSQEDPEVQFNWYVD |
| | | GVEVHNAKTKPREEQFNSTYRVVSVLTVLHQDWLNGKEYKCKVSNKGLP |
| | | SSIEKTISKAKGQPREPQVYTLPPSQEEMTKNQVSLTCLVKGFYPSDIA |
| | | VEWESNGQPENNYKTTPPVLDSDGSFFLYSRLTVDKSRWQEGNVFSCSV |
| | | MHEALHNHYTQKSLSLSLG |
| 268 | TNX09 VH-CH1- | MPLLLLLPLLWAGALAQVQLVQSGAEVVKPGASVKLSCKASGYIFTSYY |
| | CH2-CH3 IgG4 | MYWVKQAPGQGLEWIGEINPSNGDTNFNEKFKSKATLTVDKSASTAYME |
| | (S228P, | LSSLRSEDTAVYYCTRSDGRNDMDSWGQGTLVTVSSASTKGPSVFPLAP |
| | F234A, L235A) | CSRSTSESTAALGCLVKDYFPEPVTVSWNSGALTSGVHTFPAVLQSSGL |
| | | YSLSSVVTVPSSSLGTKTYTCNVDHKPSNTKVDKRVESKYGPPCPPCPA |
| | | PEAAGGPSVFLFPPKPKDTLMISRTPEVTCVVVDVSQEDPEVQFNWYVD |
| | | GVEVHNAKTKPREEQFNSTYRVVSVLTVLHQDWLNGKEYKCKVSNKGLP |
| | | SSIEKTISKAKGQPREPQVYTLPPSQEEMTKNQVSLTCLVKGFYPSDIA |
| | | VEWESNGQPENNYKTTPPVLDSDGSFFLYSRLTVDKSRWQEGNVFSCSV |
| | | MHEALHNHYTQKSLSLSLG |
| 269 | TNX12 IgG1 | MPLLLLLPLLWAGALAQVQLVQSGAEVVKPGASVKLSCKASGYIFTSYY |
| | VH-CH1-CH2- | MYWVKQAPGQGLEWIGEINPSNGDTNFNEKFKSKATLTVDKSASTAYME |
| | CH3 IgG1 | LSSLRSEDTAVYYCTRSDGRNDMDSWGQGTLVTVSSASTKGPSVFPLAP |
| | (C229S, | SSKSTSGGTAALGCLVKDYFPEPVTVSWNSGALTSGVHTFPAVLQSSGL |
| | P238S) | YSLSSVVTVPSSSLGTQTYICNVNHKPSNTKVDKKVEPKSCDKTHTCPP |
| | | SPAPELLGGSSVFLFPPKPKDTLMISRTPEVTCVVVDVSHEDPEVKFNW |
| | | YVDGVEVHNAKTKPREEQYNSTYRVVSVLTVLHQDWLNGKEYKCKVSNK |
| | | ALPAPIEKTISKAKGQPREPQVYTLPPSRDELTKNQVSLTCLVKGFYPS |
| | | DIAVEWESNGQPENNYKTTPPVLDSDGSFFLYSKLTVDKSRWQQGNVFS |
| | | CSVMHEALHNHYTQKSLSLSPG |
| 270 | TNX13 IgG1 | MPLLLLLPLLWAGALAQVQLVQSGAEVVKPGASVKLSCKASGYIFTSYY |
| | VH-CH1-CH2- | MYWVKQAPGQGLEWIGEINPSNGDTNFNEKFKSKATLTVDKSASTAYME |
| | CH3 IgG1 | LSSLRSEDTAVYYCTRSDGRNDMDSWGQGTLVTVSSASTKGPSVFPLAP |
| | (C226S, | SSKSTSGGTAALGCLVKDYFPEPVTVSWNSGALTSGVHTFPAVLQSSGL |
| | P238S) | YSLSSVVTVPSSSLGTQTYICNVNHKPSNTKVDKKVEPKSCDKTHTSPP |
| | | CPAPELLGGSSVFLFPPKPKDTLMISRTPEVTCVVVDVSHEDPEVKFNW |
| | | YVDGVEVHNAKTKPREEQYNSTYRVVSVLTVLHQDWLNGKEYKCKVSNK |
| | | ALPAPIEKTISKAKGQPREPQVYTLPPSRDELTKNQVSLTCLVKGFYPS |
| | | DIAVEWESNGQPENNYKTTPPVLDSDGSFFLYSKLTVDKSRWQQGNVFS |
| | | CSVMHEALHNHYTQKSLSLSPG |
| 271 | TNX14 VH-CH1- | MPLLLLLPLLWAGALAQVQLVQSGAEVVKPGASVKLSCKASGYIFTSYY |
| | CH2-CH3 IgG4 | MYWVKQAPGQGLEWIGEINPSNGDTNFNEKFKSKATLTVDKSASTAYME |
| | (L115T, | LSSLRSEDTAVYYCTRSDGRNDMDSWGQGTTVTVSSASTKGPSVFPLAP |
| | S228P, L235A) | CSRSTSESTAALGCLVKDYFPEPVTVSWNSGALTSGVHTFPAVLQSSGL |
| | | YSLSSVVTVPSSSLGTKTYTCNVDHKPSNTKVDKRVESKYGPPCPPCPA |
| | | PEFAGGPSVFLFPPKPKDTLMISRTPEVTCVVVDVSQEDPEVQFNWYVD |
| | | GVEVHNAKTKPREEQFNSTYRVVSVLTVLHQDWLNGKEYKCKVSNKGLP |
| | | SSIEKTISKAKGQPREPQVYTLPPSQEEMTKNQVSLTCLVKGFYPSDIA |
| | | VEWESNGQPENNYKTTPPVLDSDGSFFLYSRLTVDKSRWQEGNVFSCSV |
| | | MHEALHNHYTQKSLSLSLG |

Heavy chain full length sequences above with leader and terminal K

| | | |
|---|---|---|
| 133 | TNX01 VH-CH1- | MPLLLLLPLLWAGALAQVQLVQSGAEVVKPGASVKLSCKASGYIFTSYY |
| | CH2-CH3 | MYWVKQAPGQGLEWIGEINPSNGDTNFNEKFKSKATLTVDKSASTAYME |
| | IgG1(N297Q) | LSSLRSEDTAVYYCTRSDGRNDMDSWGQGTLVTVSSASTKGPSVFPLAP |
| | | SSKSTSGGTAALGCLVKDYFPEPVTVSWNSGALTSGVHTFPAVLQSSGL |
| | | YSLSSVVTVPSSSLGTQTYICNVNHKPSNTKVDKKVEPKSCDKTHTCPP |
| | | CPAPELLGGPSVFLFPPKPKDTLMISRTPEVTCVVVDVSHEDPEVKFNW |
| | | YVDGVEVHNAKTKPREEQYQSTYRVVSVLTVLHQDWLNGKEYKCKVSNK |
| | | ALPAPIEKTISKAKGQPREPQVYTLPPSRDELTKNQVSLTCLVKGFYPS |
| | | DIAVEWESNGQPENNYKTTPPVLDSDGSFFLYSKLTVDKSRWQQGNVFS |
| | | CSVMHEALHNHYTQKSLSLSPGK |
| 134 | TNX02 VH-CH1- | MPLLLLLPLLWAGALAQVQLVQSGAEVVKPGASVKLSCKASGYIFTSYY |
| | CH2-CH3 IgG1 | MYWVKQAPGQGLEWIGEINPSNGDTNFNEKFKSKATLTVDKSASTAYME |
| | (wt) | LSSLRSEDTAVYYCTRSDGRNDMDSWGQGTLVTVSSASTKGPSVFPLAP |
| | | SSKSTSGGTAALGCLVKDYFPEPVTVSWNSGALTSGVHTFPAVLQSSGL |
| | | YSLSSVVTVPSSSLGTQTYICNVNHKPSNTKVDKKVEPKSCDKTHTCPP |
| | | CPAPELLGGPSVFLFPPKPKDTLMISRTPEVTCVVVDVSHEDPEVKFNW |
| | | YVDGVEVHNAKTKPREEQYNSTYRVVSVLTVLHQDWLNGKEYKCKVSNK |
| | | ALPAPIEKTISKAKGQPREPQVYTLPPSRDELTKNQVSLTCLVKGFYPS |
| | | DIAVEWESNGQPENNYKTTPPVLDSDGSFFLYSKLTVDKSRWQQGNVFS |
| | | CSVMHEALHNHYTQKSLSLSPGK |
| 135 | TNX03 VH-CH1- | MPLLLLLPLLWAGALAQVQLVQSGAEVVKPGASVKLSCKASGYIFTSYY |
| | CH2-CH3 | MYWVKQAPGQGLEWIGEINPSNGDTNFNEKFKSKATLTVDKSASTAYME |
| | IgG1(N297G) | LSSLRSEDTAVYYCTRSDGRNDMDSWGQGTLVTVSSASTKGPSVFPLAP |
| | | SSKSTSGGTAALGCLVKDYFPEPVTVSWNSGALTSGVHTFPAVLQSSGL |
| | | YSLSSVVTVPSSSLGTQTYICNVNHKPSNTKVDKKVEPKSCDKTHTCPP |
| | | CPAPELLGGPSVFLFPPKPKDTLMISRTPEVTCVVVDVSHEDPEVKFNW |
| | | YVDGVEVHNAKTKPREEQYGSTYRVVSVLTVLHQDWLNGKEYKCKVSNK |
| | | ALPAPIEKTISKAKGQPREPQVYTLPPSRDELTKNQVSLTCLVKGFYPS |
| | | DIAVEWESNGQPENNYKTTPPVLDSDGSFFLYSKLTVDKSRWQQGNVFS |
| | | CSVMHEALHNHYTQKSLSLSPGK |
| 136 | TNX04 VH-CH1- | MPLLLLLPLLWAGALAQVQLVQSGAEVVKPGASVKLSCKASGYIFTSYY |
| | CH2-CH3 IgG1 | MYWVKQAPGQGLEWIGEINPSNGDTNFNEKFKSKATLTVDKSASTAYME |
| | (C220S, | LSSLRSEDTAVYYCTRSDGRNDMDSWGQGTLVTVSSASTKGPSVFPLAP |
| | C226S, C229S, | SSKSTSGGTAALGCLVKDYFPEPVTVSWNSGALTSGVHTFPAVLQSSGL |
| | P238S) | YSLSSVVTVPSSSLGTQTYICNVNHKPSNTKVDKKVEPKSSDKTHTSPP |
| | | SPAPELLGGSSVFLFPPKPKDTLMISRTPEVTCVVVDVSHEDPEVKFNW |
| | | YVDGVEVHNAKTKPREEQYNSTYRVVSVLTVLHQDWLNGKEYKCKVSNK |
| | | ALPAPIEKTISKAKGQPREPQVYTLPPSRDELTKNQVSLTCLVKGFYPS |
| | | DIAVEWESNGQPENNYKTTPPVLDSDGSFFLYSKLTVDKSRWQQGNVFS |
| | | CSVMHEALHNHYTQKSLSLSPGK |
| 137 | TNX05 VH-CH1- | MPLLLLLPLLWAGALAQVQLVQSGAEVVKPGASVKLSCKASGYIFTSYY |
| | CH2-CH3 IgG4 | MYWVKQAPGQGLEWIGEINPSNGDTNFNEKFKSKATLTVDKSASTAYME |
| | (S228P, | LSSLRSEDTAVYYCTRSDGRNDMDSWGQGTLVTVSSASTKGPSVFPLAP |
| | L235A) | CSRSTSESTAALGCLVKDYFPEPVTVSWNSGALTSGVHTFPAVLQSSGL |
| | | YSLSSVVTVPSSSLGTKTYTCNVDHKPSNTKVDKRVESKYGPPCPPCPA |
| | | PEFAGGPSVFLFPPKPKDTLMISRTPEVTCVVVDVSQEDPEVQFNWYVD |
| | | GVEVHNAKTKPREEQFNSTYRVVSVLTVLHQDWLNGKEYKCKVSNKGLP |
| | | SSIEKTISKAKGQPREPQVYTLPPSQEEMTKNQVSLTCLVKGFYPSDIA |
| | | VEWESNGQPENNYKTTPPVLDSDGSFFLYSRLTVDKSRWQEGNVFSCSV |
| | | MHEALHNHYTQKSLSLSLGK |
| 138 | TNX06 VH-CH1- | MPLLLLLPLLWAGALAQVQLVQSGAEVVKPGASVKLSCKASGYIFTSYY |
| | CH2-CH3 IgG4 | MYWVKQAPGQGLEWIGEINPSNGDTNFNEKFKSKATLTVDKSASTAYME |
| | Wild Type | LSSLRSEDTAVYYCTRSDGRNDMDSWGQGTLVTVSSASTKGPSVFPLAP |
| | | CSRSTSESTAALGCLVKDYFPEPVTVSWNSGALTSGVHTFPAVLQSSGL |
| | | YSLSSVVTVPSSSLGTKTYTCNVDHKPSNTKVDKRVESKYGPPCPSCPA |
| | | PEFLGGPSVFLFPPKPKDTLMISRTPEVTCVVVDVSQEDPEVQFNWYVD |
| | | GVEVHNAKTKPREEQFNSTYRVVSVLTVLHQDWLNGKEYKCKVSNKGLP |
| | | SSIEKTISKAKGQPREPQVYTLPPSQEEMTKNQVSLTCLVKGFYPSDIA |
| | | VEWESNGQPENNYKTTPPVLDSDGSFFLYSRLTVDKSRWQEGNVFSCSV |
| | | MHEALHNHYTQKSLSLSLGK |
| 139 | VH-CH1-CH2- | MPLLLLLPLLWAGALAQVQLVQSGAEVVKPGASVKLSCKASGYIFTSYY |
| | CH3 IgG2 Wild | MYWVKQAPGQGLEWIGEINPSNGDTNFNEKFKSKATLTVDKSASTAYME |
| | Type | LSSLRSEDTAVYYCTRSDGRNDMDSWGQGTLVTVSSASTKGPSVFPLAP |
| | | CSRSTSESTAALGCLVKDYFPEPVTVSWNSGALTSGVHTFPAVLQSSGL |
| | | YSLSSVVTVTSSNFGTQTYTCNVDHKPSNTKVDKTVERKCCVECPPCPA |
| | | PPVAGPSVFLFPPKPKDTLMISRTPEVTCVVVDVSHEDPEVQFNWYVDG |
| | | MEVHNAKTKPREEQFNSTFRVVSVLTVVHQDWLNGKEYKCKVSNKGLPA |
| | | PIEKTISKTKGQPREPQVYTLPPSREEMTKNQVSLTCLVKGFYPSDIAV |
| | | EWESNGQPENNYKTTPPMLDSDGSFFLYSKLTVDKSRWQQGNVFSCSVM |
| | | HEALHNHYTQKSLSLSPGK |
| 140 | VH-CH1-CH2- | MPLLLLLPLLWAGALAQVQLVQSGAEVVKPGASVKLSCKASGYIFTSYY |
| | CH3 IgG1 | MYWVKQAPGQGLEWIGEINPSNGDTNFNEKFKSKATLTVDKSASTAYME |
| | (ΔE216-K222 | LSSLRSEDTAVYYCTRSDGRNDMDSWGQGTLVTVSSASTKGPSVFPLAP |
| | IN HINGE) | SSKSTSGGTAALGCLVKDYFPEPVTVSWNSGALTSGVHTFPAVLQSSGL |
| | (C226S, | YSLSSVVTVPSSSLGTQTYICNVNHKPSNTKVDKKVTHTSPPSPAPELL |
| | C229S, P238S) | GGSSVFLFPPKPKDTLMISRTPEVTCVVVDVSHEDPEVKFNWYVDGVEV |
| | | HNAKTKPREEQYNSTYRVVSVLTVLHQDWLNGKEYKCKVSNKALPAPIE |
| | | KTISKAKGQPREPQVYTLPPSRDELTKNQVSLTCLVKGFYPSDIAVEWE |
| | | SNGQPENNYKTTPPVLDSDGSFFLYSKLTVDKSRWQQGNVFSCSVMHEA |
| | | LHNHYTQKSLSLSPGK |
| 141 | VH-CH1-CH2- | MPLLLLLPLLWAGALAQVQLVQSGAEVVKPGASVKLSCKASGYIFTSYY |
| | CH3 IgG1 | MYWVKQAPGQGLEWIGEINPSNGDTNFNEKFKSKATLTVDKSASTAYME |
| | (C220S, | LSSLRSEDTAVYYCTRSDGRNDMDSWGQGTLVTVSSASTKGPSVFPLAP |
| | C226S, C229S, | SSKSTSGGTAALGCLVKDYFPEPVTVSWNSGALTSGVHTFPAVLQSSGL |
| | P238S, N297Q) | YSLSSVVTVPSSSLGTQTYICNVNHKPSNTKVDKKVEPKSSDKTHTSPP |
| | | SPAPELLGGSSVFLFPPKPKDTLMISRTPEVTCVVVDVSHEDPEVKFNW |
| | | YVDGVEVHNAKTKPREEQYQSTYRVVSVLTVLHQDWLNGKEYKCKVSNK |
| | | ALPAPIEKTISKAKGQPREPQVYTLPPSRDELTKNQVSLTCLVKGFYPS |
| | | DIAVEWESNGQPENNYKTTPPVLDSDGSFFLYSKLTVDKSRWQQGNVFS |
| | | CSVMHEALHNHYTQKSLSLSPGK |
| 142 | VH-CH1-CH2- | MPLLLLLPLLWAGALAQVQLVQSGAEVVKPGASVKLSCKASGYIFTSYY |
| | CH3 IgG1 | MYWVKQAPGQGLEWIGEINPSNGDTNFNEKFKSKATLTVDKSASTAYME |
| | (ΔE216-K222 | LSSLRSEDTAVYYCTRSDGRNDMDSWGQGTLVTVSSASTKGPSVFPLAP |
| | IN HINGE) | SSKSTSGGTAALGCLVKDYFPEPVTVSWNSGALTSGVHTFPAVLQSSGL |
| | (C226S, | YSLSSVVTVPSSSLGTQTYICNVNHKPSNTKVDKKVTHTSPPSPAPELL |
| | C229S, P238S, | GGSSVFLFPPKPKDTLMISRTPEVTCVVVDVSHEDPEVKFNWYVDGVEV |
| | N297Q) | HNAKTKPREEQYQSTYRVVSVLTVLHQDWLNGKEYKCKVSNKALPAPIE |
| | | KTISKAKGQPREPQVYTLPPSRDELTKNQVSLTCLVKGFYPSDIAVEWE |
| | | SNGQPENNYKTTPPVLDSDGSFFLYSKLTVDKSRWQQGNVFSCSVMHEA |
| | | LHNHYTQKSLSLSPGK |
| 143 | VH-CH1-CH2- | MPLLLLLPLLWAGALAQVQLVQSGAEVVKPGASVKLSCKASGYIFTSYY |
| | CH3 IgG1 | MYWVKQAPGQGLEWIGEINPSNGDTNFNEKFKSKATLTVDKSASTAYME |
| | (C220S, | LSSLRSEDTAVYYCTRSDGRNDMDSWGQGTLVTVSSASTKGPSVFPLAP |
| | C226S, C229S, | SSKSTSGGTAALGCLVKDYFPEPVTVSWNSGALTSGVHTFPAVLQSSGL |
| | P238S, N297G) | YSLSSVVTVPSSSLGTQTYICNVNHKPSNTKVDKKVEPKSSDKTHTSPP |
| | | SPAPELLGGSSVFLFPPKPKDTLMISRTPEVTCVVVDVSHEDPEVKFNW |
| | | YVDGVEVHNAKTKPREEQYGSTYRVVSVLTVLHQDWLNGKEYKCKVSNK |
| | | ALPAPIEKTISKAKGQPREPQVYTLPPSRDELTKNQVSLTCLVKGFYPS |
| | | DIAVEWESNGQPENNYKTTPPVLDSDGSFFLYSKLTVDKSRWQQGNVFS |
| | | CSVMHEALHNHYTQKSLSLSPGK |
| 144 | VH-CH1-CH2- | MPLLLLLPLLWAGALAQVQLVQSGAEVVKPGASVKLSCKASGYIFTSYY |
| | CH3 IgG1 | MYWVKQAPGQGLEWIGEINPSNGDTNFNEKFKSKATLTVDKSASTAYME |
| | (ΔE216-K222 | LSSLRSEDTAVYYCTRSDGRNDMDSWGQGTLVTVSSASTKGPSVFPLAP |
| | IN HINGE) | SSKSTSGGTAALGCLVKDYFPEPVTVSWNSGALTSGVHTFPAVLQSSGL |
| | (C226S, | YSLSSVVTVPSSSLGTQTYICNVNHKPSNTKVDKKVTHTSPPSPAPELL |
| | C229S, P238S, | GGSSVFLFPPKPKDTLMISRTPEVTCVVVDVSHEDPEVKFNWYVDGVEV |
| | N297G) | HNAKTKPREEQYGSTYRVVSVLTVLHQDWLNGKEYKCKVSNKALPAPIE |
| | | KTISKAKGQPREPQVYTLPPSRDELTKNQVSLTCLVKGFYPSDIAVEWE |
| | | SNGQPENNYKTTPPVLDSDGSFFLYSKLTVDKSRWQQGNVFSCSVMHEA |
| | | LHNHYTQKSLSLSPGK |
| 145 | TNX10 VH-CH1- | MPLLLLLPLLWAGALAQVQLVQSGAEVVKPGASVKLSCKASGYIFTSYY |
| | CH2-CH3 IgG1 | MYWVKQAPGQGLEWIGEINPSNGDTNFNEKFKSKATLTVDKSASTAYME |
| | (L234A, | LSSLRSEDTAVYYCTRSDGRNDMDSWGQGTLVTVSSASTKGPSVFPLAP |
| | L235A) | SSKSTSGGTAALGCLVKDYFPEPVTVSWNSGALTSGVHTFPAVLQSSGL |
| | | YSLSSVVTVPSSSLGTQTYICNVNHKPSNTKVDKKVEPKSCDKTHTCPP |
| | | CPAPEAAGGPSVFLFPPKPKDTLMISRTPEVTCVVVDVSHEDPEVKFNW |
| | | YVDGVEVHNAKTKPREEQYNSTYRVVSVLTVLHQDWLNGKEYKCKVSNK |
| | | ALPAPIEKTISKAKGQPREPQVYTLPPSRDELTKNQVSLTCLVKGFYPS |
| | | DIAVEWESNGQPENNYKTTPPVLDSDGSFFLYSKLTVDKSRWQQGNVFS |
| | | CSVMHEALHNHYTQKSLSLSPGK |
| 146 | TNX11 VH-CH1- | MPLLLLLPLLWAGALAQVQLVQSGAEVVKPGASVKLSCKASGYIFTSYY |
| | CH2-CH3 IgG1 | MYWVKQAPGQGLEWIGEINPSNGDTNFNEKFKSKATLTVDKSASTAYME |
| | (C226S, | LSSLRSEDTAVYYCTRSDGRNDMDSWGQGTLVTVSSASTKGPSVFPLAP |
| | C229S, P238S) | SSKSTSGGTAALGCLVKDYFPEPVTVSWNSGALTSGVHTFPAVLQSSGL |
| | | YSLSSVVTVPSSSLGTQTYICNVNHKPSNTKVDKKVEPKSCDKTHTSPP |
| | | SPAPELLGGSSVFLFPPKPKDTLMISRTPEVTCVVVDVSHEDPEVKFNW |
| | | YVDGVEVHNAKTKPREEQYNSTYRVVSVLTVLHQDWLNGKEYKCKVSNK |
| | | ALPAPIEKTISKAKGQPREPQVYTLPPSRDELTKNQVSLTCLVKGFYPS |
| | | DIAVEWESNGQPENNYKTTPPVLDSDGSFFLYSKLTVDKSRWQQGNVFS |
| | | CSVMHEALHNHYTQKSLSLSPGK |
| 272 | TNX07 VH-CH1- | MPLLLLLPLLWAGALAQVQLVQSGAEVVKPGASVKLSCKASGYIFTSYY |
| | CH2-CH3 IgG4 | MYWVKQAPGQGLEWIGEINPSNGDTNFNEKFKSKATLTVDKSASTAYME |
| | (S228P) | LSSLRSEDTAVYYCTRSDGRNDMDSWGQGTLVTVSSASTKGPSVFPLAP |
| | | CSRSTSESTAALGCLVKDYFPEPVTVSWNSGALTSGVHTFPAVLQSSGL |
| | | YSLSSVVTVPSSSLGTKTYTCNVDHKPSNTKVDKRVESKYGPPCPPCPA |
| | | PEFLGGPSVFLFPPKPKDTLMISRTPEVTCVVVDVSQEDPEVQFNWYVD |
| | | GVEVHNAKTKPREEQFNSTYRVVSVLTVLHQDWLNGKEYKCKVSNKGLP |
| | | SSIEKTISKAKGQPREPQVYTLPPSQEEMTKNQVSLTCLVKGFYPSDIA |
| | | VEWESNGQPENNYKTTPPVLDSDGSFFLYSRLTVDKSRWQEGNVFSCSV |
| | | MHEALHNHYTQKSLSLSLGK |
| 273 | TNX08 VH-CH1- | MPLLLLLPLLWAGALAQVQLVQSGAEVVKPGASVKLSCKASGYIFTSYY |
| | CH2-CH3 IgG4 | MYWVKQAPGQGLEWIGEINPSNGDTNFNEKFKSKATLTVDKSASTAYME |
| | (S228P, | LSSLRSEDTAVYYCTRSDGRNDMDSWGQGTLVTVSSASTKGPSVFPLAP |
| | L235E) | CSRSTSESTAALGCLVKDYFPEPVTVSWNSGALTSGVHTFPAVLQSSGL |
| | | YSLSSVVTVPSSSLGTKTYTCNVDHKPSNTKVDKRVESKYGPPCPPCPA |
| | | PEFEGGPSVFLFPPKPKDTLMISRTPEVTCVVVDVSQEDPEVQFNWYVD |
| | | GVEVHNAKTKPREEQFNSTYRVVSVLTVLHQDWLNGKEYKCKVSNKGLP |
| | | SSIEKTISKAKGQPREPQVYTLPPSQEEMTKNQVSLTCLVKGFYPSDIA |
| | | VEWESNGQPENNYKTTPPVLDSDGSFFLYSRLTVDKSRWQEGNVFSCSV |
| | | MHEALHNHYTQKSLSLSLGK |
| 274 | TNX09 VH-CH1- | MPLLLLLPLLWAGALAQVQLVQSGAEVVKPGASVKLSCKASGYIFTSYY |
| | CH2-CH3 IgG4 | MYWVKQAPGQGLEWIGEINPSNGDTNFNEKFKSKATLTVDKSASTAYME |
| | (S228P, | LSSLRSEDTAVYYCTRSDGRNDMDSWGQGTLVTVSSASTKGPSVFPLAP |
| | F234A, L235A) | CSRSTSESTAALGCLVKDYFPEPVTVSWNSGALTSGVHTFPAVLQSSGL |
| | | YSLSSVVTVPSSSLGTKTYTCNVDHKPSNTKVDKRVESKYGPPCPPCPA |
| | | PEAAGGPSVFLFPPKPKDTLMISRTPEVTCVVVDVSQEDPEVQFNWYVD |
| | | GVEVHNAKTKPREEQFNSTYRVVSVLTVLHQDWLNGKEYKCKVSNKGLP |
| | | SSIEKTISKAKGQPREPQVYTLPPSQEEMTKNQVSLTCLVKGFYPSDIA |
| | | VEWESNGQPENNYKTTPPVLDSDGSFFLYSRLTVDKSRWQEGNVFSCSV |
| | | MHEALHNHYTQKSLSLSLGK |
| 275 | TNX12 IgG1 | MPLLLLLPLLWAGALAQVQLVQSGAEVVKPGASVKLSCKASGYIFTSYY |
| | VH-CH1-CH2- | MYWVKQAPGQGLEWIGEINPSNGDTNFNEKFKSKATLTVDKSASTAYME |
| | CH3 IgG1 | LSSLRSEDTAVYYCTRSDGRNDMDSWGQGTLVTVSSASTKGPSVFPLAP |
| | (C229S, | SSKSTSGGTAALGCLVKDYFPEPVTVSWNSGALTSGVHTFPAVLQSSGL |
| | P238S) | YSLSSVVTVPSSSLGTQTYICNVNHKPSNTKVDKKVEPKSCDKTHTCPP |
| | | SPAPELLGGSSVFLFPPKPKDTLMISRTPEVTCVVVDVSHEDPEVKFNW |
| | | YVDGVEVHNAKTKPREEQYNSTYRVVSVLTVLHQDWLNGKEYKCKVSNK |
| | | ALPAPIEKTISKAKGQPREPQVYTLPPSRDELTKNQVSLTCLVKGFYPS |
| | | DIAVEWESNGQPENNYKTTPPVLDSDGSFFLYSKLTVDKSRWQQGNVFS |
| | | CSVMHEALHNHYTQKSLSLSPGK |
| 276 | TNX13 IgG1 | MPLLLLLPLLWAGALAQVQLVQSGAEVVKPGASVKLSCKASGYIFTSYY |
| | VH-CH1-CH2- | MYWVKQAPGQGLEWIGEINPSNGDTNFNEKFKSKATLTVDKSASTAYME |
| | CH3 IgG1 | LSSLRSEDTAVYYCTRSDGRNDMDSWGQGTLVTVSSASTKGPSVFPLAP |
| | (C226S, | SSKSTSGGTAALGCLVKDYFPEPVTVSWNSGALTSGVHTFPAVLQSSGL |
| | P238S) | YSLSSVVTVPSSSLGTQTYICNVNHKPSNTKVDKKVEPKSCDKTHTSPP |
| | | CPAPELLGGSSVFLFPPKPKDTLMISRTPEVTCVVVDVSHEDPEVKFNW |
| | | YVDGVEVHNAKTKPREEQYNSTYRVVSVLTVLHQDWLNGKEYKCKVSNK |
| | | ALPAPIEKTISKAKGQPREPQVYTLPPSRDELTKNQVSLTCLVKGFYPS |
| | | DIAVEWESNGQPENNYKTTPPVLDSDGSFFLYSKLTVDKSRWQQGNVFS |
| | | CSVMHEALHNHYTQKSLSLSPGK |
| 277 | TNX14 VH-CH1- | MPLLLLLPLLWAGALAQVQLVQSGAEVVKPGASVKLSCKASGYIFTSYY |
| | CH2-CH3 IgG4 | MYWVKQAPGQGLEWIGEINPSNGDTNFNEKFKSKATLTVDKSASTAYME |
| | (L115T, | LSSLRSEDTAVYYCTRSDGRNDMDSWGQGTTVTVSSASTKGPSVFPLAP |
| | S228P, L235A) | CSRSTSESTAALGCLVKDYFPEPVTVSWNSGALTSGVHTFPAVLQSSGL |
| | | YSLSSVVTVPSSSLGTKTYTCNVDHKPSNTKVDKRVESKYGPPCPPCPA |
| | | PEFAGGPSVFLFPPKPKDTLMISRTPEVTCVVVDVSQEDPEVQFNWYVD |
| | | GVEVHNAKTKPREEQFNSTYRVVSVLTVLHQDWLNGKEYKCKVSNKGLP |
| | | SSIEKTISKAKGQPREPQVYTLPPSQEEMTKNQVSLTCLVKGFYPSDIA |
| | | VEWESNGQPENNYKTTPPVLDSDGSFFLYSRLTVDKSRWQEGNVFSCSV |
| | | MHEALHNHYTQKSLSLSLGK |

Full-length heavy chain sequences without leader and no terminal K

| | | |
|---|---|---|
| 147 | TNX01 VH-CH1- | QVQLVQSGAEVVKPGASVKLSCKASGYIFTSYYMYWVKQAPGQGLEWIG |
| | CH2-CH3 | EINPSNGDTNFNEKFKSKATLTVDKSASTAYMELSSLRSEDTAVYYCTR |
| | IgG1(N297Q) | SDGRNDMDSWGQGTLVTVSSASTKGPSVFPLAPSSKSTSGGTAALGCLV |
| | | KDYFPEPVTVSWNSGALTSGVHTFPAVLQSSGLYSLSSVVTVPSSSLGT |
| | | QTYICNVNHKPSNTKVDKKVEPKSCDKTHTCPPCPAPELLGGPSVFLFP |
| | | PKPKDTLMISRTPEVTCVVVDVSHEDPEVKFNWYVDGVEVHNAKTKPRE |
| | | EQYQSTYRVVSVLTVLHQDWLNGKEYKCKVSNKALPAPIEKTISKAKGQ |
| | | PREPQVYTLPPSRDELTKNQVSLTCLVKGFYPSDIAVEWESNGQPENNY |
| | | KTTPPVLDSDGSFFLYSKLTVDKSRWQQGNVFSCSVMHEALHNHYTQKS |
| | | LSLSPG |
| 148 | TNX02 VH-CH1- | QVQLVQSGAEVVKPGASVKLSCKASGYIFTSYYMYWVKQAPGQGLEWIG |
| | CH2-CH3 IgG1 | EINPSNGDTNFNEKFKSKATLTVDKSASTAYMELSSLRSEDTAVYYCTR |
| | (wt) | SDGRNDMDSWGQGTLVTVSSASTKGPSVFPLAPSSKSTSGGTAALGCLV |
| | | KDYFPEPVTVSWNSGALTSGVHTFPAVLQSSGLYSLSSVVTVPSSSLGT |
| | | QTYICNVNHKPSNTKVDKKVEPKSCDKTHTCPPCPAPELLGGPSVFLFP |
| | | PKPKDTLMISRTPEVTCVVVDVSHEDPEVKFNWYVDGVEVHNAKTKPRE |
| | | EQYNSTYRVVSVLTVLHQDWLNGKEYKCKVSNKALPAPIEKTISKAKGQ |
| | | PREPQVYTLPPSRDELTKNQVSLTCLVKGFYPSDIAVEWESNGQPENNY |
| | | KTTPPVLDSDGSFFLYSKLTVDKSRWQQGNVFSCSVMHEALHNHYTQKS |
| | | LSLSPG |
| 149 | TNX03 VH-CH1- | QVQLVQSGAEVVKPGASVKLSCKASGYIFTSYYMYWVKQAPGQGLEWIG |
| | CH2-CH3 | EINPSNGDTNFNEKFKSKATLTVDKSASTAYMELSSLRSEDTAVYYCTR |
| | IgG1(N297G) | SDGRNDMDSWGQGTLVTVSSASTKGPSVFPLAPSSKSTSGGTAALGCLV |
| | | KDYFPEPVTVSWNSGALTSGVHTFPAVLQSSGLYSLSSVVTVPSSSLGT |
| | | QTYICNVNHKPSNTKVDKKVEPKSCDKTHTCPPCPAPELLGGPSVFLFP |
| | | PKPKDTLMISRTPEVTCVVVDVSHEDPEVKFNWYVDGVEVHNAKTKPRE |
| | | EQYGSTYRVVSVLTVLHQDWLNGKEYKCKVSNKALPAPIEKTISKAKGQ |
| | | PREPQVYTLPPSRDELTKNQVSLTCLVKGFYPSDIAVEWESNGQPENNY |
| | | KTTPPVLDSDGSFFLYSKLTVDKSRWQQGNVFSCSVMHEALHNHYTQKS |
| | | LSLSPG |
| 150 | TNX04 VH-CH1- | QVQLVQSGAEVVKPGASVKLSCKASGYIFTSYYMYWVKQAPGQGLEWIG |
| | CH2-CH3 IgG1 | EINPSNGDTNFNEKFKSKATLTVDKSASTAYMELSSLRSEDTAVYYCTR |
| | (C220S, | SDGRNDMDSWGQGTLVTVSSASTKGPSVFPLAPSSKSTSGGTAALGCLV |
| | C226S, C229S, | KDYFPEPVTVSWNSGALTSGVHTFPAVLQSSGLYSLSSVVTVPSSSLGT |
| | P238S) | QTYICNVNHKPSNTKVDKKVEPKSSDKTHTSPPSPAPELLGGSSVFLFP |
| | | PKPKDTLMISRTPEVTCVVVDVSHEDPEVKFNWYVDGVEVHNAKTKPRE |
| | | EQYNSTYRVVSVLTVLHQDWLNGKEYKCKVSNKALPAPIEKTISKAKGQ |
| | | PREPQVYTLPPSRDELTKNQVSLTCLVKGFYPSDIAVEWESNGQPENNY |
| | | KTTPPVLDSDGSFFLYSKLTVDKSRWQQGNVFSCSVMHEALHNHYTQKS |
| | | LSLSPG |
| 151 | TNX05 VH-CH1- | QVQLVQSGAEVVKPGASVKLSCKASGYIFTSYYMYWVKQAPGQGLEWIG |
| | CH2-CH3 IgG4 | EINPSNGDTNFNEKFKSKATLTVDKSASTAYMELSSLRSEDTAVYYCTR |
| | (S228P, | SDGRNDMDSWGQGTLVTVSSASTKGPSVFPLAPCSRSTSESTAALGCLV |
| | L235A) | KDYFPEPVTVSWNSGALTSGVHTFPAVLQSSGLYSLSSVVTVPSSSLGT |
| | | KTYTCNVDHKPSNTKVDKRVESKYGPPCPPCPAPEFAGGPSVFLFPPKP |
| | | KDTLMISRTPEVTCVVVDVSQEDPEVQFNWYVDGVEVHNAKTKPREEQF |
| | | NSTYRVVSVLTVLHQDWLNGKEYKCKVSNKGLPSSIEKTISKAKGQPRE |
| | | PQVYTLPPSQEEMTKNQVSLTCLVKGFYPSDIAVEWESNGQPENNYKTT |
| | | PPVLDSDGSFFLYSRLTVDKSRWQEGNVFSCSVMHEALHNHYTQKSLSL |
| | | SLG |
| 152 | TNX06 VH-CH1- | QVQLVQSGAEVVKPGASVKLSCKASGYIFTSYYMYWVKQAPGQGLEWIG |
| | CH2-CH3 IgG4 | EINPSNGDTNFNEKFKSKATLTVDKSASTAYMELSSLRSEDTAVYYCTR |
| | Wild Type | SDGRNDMDSWGQGTLVTVSSASTKGPSVFPLAPCSRSTSESTAALGCLV |
| | | KDYFPEPVTVSWNSGALTSGVHTFPAVLQSSGLYSLSSVVTVPSSSLGT |
| | | KTYTCNVDHKPSNTKVDKRVESKYGPPCPSCPAPEFLGGPSVFLFPPKP |
| | | KDTLMISRTPEVTCVVVDVSQEDPEVQFNWYVDGVEVHNAKTKPREEQF |
| | | NSTYRVVSVLTVLHQDWLNGKEYKCKVSNKGLPSSIEKTISKAKGQPRE |
| | | PQVYTLPPSQEEMTKNQVSLTCLVKGFYPSDIAVEWESNGQPENNYKTT |
| | | PPVLDSDGSFFLYSRLTVDKSRWQEGNVFSCSVMHEALHNHYTQKSLSL |
| | | SLG |
| 153 | VH-CH1-CH2- | QVQLVQSGAEVVKPGASVKLSCKASGYIFTSYYMYWVKQAPGQGLEWIG |
| | CH3 IgG2 Wild | EINPSNGDTNFNEKFKSKATLTVDKSASTAYMELSSLRSEDTAVYYCTR |
| | Type | SDGRNDMDSWGQGTLVTVSSASTKGPSVFPLAPCSRSTSESTAALGCLV |
| | | KDYFPEPVTVSWNSGALTSGVHTFPAVLQSSGLYSLSSVVTVTSSNFGT |
| | | QTYTCNVDHKPSNTKVDKTVERKCCVECPPCPAPPVAGPSVFLFPPKPK |
| | | DTLMISRTPEVTCVVVDVSHEDPEVQFNWYVDGMEVHNAKTKPREEQFN |
| | | STFRVVSVLTVVHQDWLNGKEYKCKVSNKGLPAPIEKTISKTKGQPREP |
| | | QVYTLPPSREEMTKNQVSLTCLVKGFYPSDIAVEWESNGQPENNYKTTP |
| | | PMLDSDGSFFLYSKLTVDKSRWQQGNVFSCSVMHEALHNHYTQKSLSLS |
| | | PG |
| 154 | VH-CH1-CH2- | QVQLVQSGAEVVKPGASVKLSCKASGYIFTSYYMYWVKQAPGQGLEWIG |
| | CH3 IgG1 | EINPSNGDTNFNEKFKSKATLTVDKSASTAYMELSSLRSEDTAVYYCTR |
| | (ΔE216-K222 | SDGRNDMDSWGQGTLVTVSSASTKGPSVFPLAPSSKSTSGGTAALGCLV |
| | IN HINGE) | KDYFPEPVTVSWNSGALTSGVHTFPAVLQSSGLYSLSSVVTVPSSSLGT |
| | (C226S, | QTYICNVNHKPSNTKVDKKVTHTSPPSPAPELLGGSSVFLFPPKPKDTL |
| | C229S, P238S) | MISRTPEVTCVVVDVSHEDPEVKFNWYVDGVEVHNAKTKPREEQYNSTY |
| | | RVVSVLTVLHQDWLNGKEYKCKVSNKALPAPIEKTISKAKGQPREPQVY |
| | | TLPPSRDELTKNQVSLTCLVKGFYPSDIAVEWESNGQPENNYKTTPPVL |
| | | DSDGSFFLYSKLTVDKSRWQQGNVFSCSVMHEALHNHYTQKSLSLSPG |
| 155 | VH-CH1-CH2- | QVQLVQSGAEVVKPGASVKLSCKASGYIFTSYYMYWVKQAPGQGLEWIG |
| | CH3 IgG1 | EINPSNGDTNFNEKFKSKATLTVDKSASTAYMELSSLRSEDTAVYYCTR |
| | (C220S, | SDGRNDMDSWGQGTLVTVSSASTKGPSVFPLAPSSKSTSGGTAALGCLV |
| | C226S, C229S, | KDYFPEPVTVSWNSGALTSGVHTFPAVLQSSGLYSLSSVVTVPSSSLGT |
| | P238S, N297Q) | QTYICNVNHKPSNTKVDKKVEPKSSDKTHTSPPSPAPELLGGSSVFLFP |
| | | PKPKDTLMISRTPEVTCVVVDVSHEDPEVKFNWYVDGVEVHNAKTKPRE |
| | | EQYQSTYRVVSVLTVLHQDWLNGKEYKCKVSNKALPAPIEKTISKAKGQ |
| | | PREPQVYTLPPSRDELTKNQVSLTCLVKGFYPSDIAVEWESNGQPENNY |
| | | KTTPPVLDSDGSFFLYSKLTVDKSRWQQGNVFSCSVMHEALHNHYTQKS |
| | | LSLSPG |
| 156 | VH-CH1-CH2- | QVQLVQSGAEVVKPGASVKLSCKASGYIFTSYYMYWVKQAPGQGLEWIG |
| | CH3 IgG1 | EINPSNGDTNFNEKFKSKATLTVDKSASTAYMELSSLRSEDTAVYYCTR |
| | (ΔE216-K222 | SDGRNDMDSWGQGTLVTVSSASTKGPSVFPLAPSSKSTSGGTAALGCLV |
| | IN HINGE) | KDYFPEPVTVSWNSGALTSGVHTFPAVLQSSGLYSLSSVVTVPSSSLGT |
| | (C226S, | QTYICNVNHKPSNTKVDKKVTHTSPPSPAPELLGGSSVFLFPPKPKDTL |
| | C229S, P238S, | MISRTPEVTCVVVDVSHEDPEVKFNWYVDGVEVHNAKTKPREEQYQSTY |
| | N297Q) | RVVSVLTVLHQDWLNGKEYKCKVSNKALPAPIEKTISKAKGQPREPQVY |
| | | TLPPSRDELTKNQVSLTCLVKGFYPSDIAVEWESNGQPENNYKTTPPVL |
| | | DSDGSFFLYSKLTVDKSRWQQGNVFSCSVMHEALHNHYTQKSLSLSPG |
| 157 | VH-CH1-CH2- | QVQLVQSGAEVVKPGASVKLSCKASGYIFTSYYMYWVKQAPGQGLEWIG |
| | CH3 IgG1 | EINPSNGDTNFNEKFKSKATLTVDKSASTAYMELSSLRSEDTAVYYCTR |
| | (C220S, | SDGRNDMDSWGQGTLVTVSSASTKGPSVFPLAPSSKSTSGGTAALGCLV |
| | C226S, C229S, | KDYFPEPVTVSWNSGALTSGVHTFPAVLQSSGLYSLSSVVTVPSSSLGT |
| | P238S, N297G) | QTYICNVNHKPSNTKVDKKVEPKSSDKTHTSPPSPAPELLGGSSVFLFP |
| | | PKPKDTLMISRTPEVTCVVVDVSHEDPEVKFNWYVDGVEVHNAKTKPRE |
| | | EQYGSTYRVVSVLTVLHQDWLNGKEYKCKVSNKALPAPIEKTISKAKGQ |
| | | PREPQVYTLPPSRDELTKNQVSLTCLVKGFYPSDIAVEWESNGQPENNY |
| | | KTTPPVLDSDGSFFLYSKLTVDKSRWQQGNVFSCSVMHEALHNHYTQKS |
| | | LSLSPG |
| 158 | VH-CH1-CH2- | QVQLVQSGAEVVKPGASVKLSCKASGYIFTSYYMYWVKQAPGQGLEWIG |
| | CH3 IgG1 | EINPSNGDTNFNEKFKSKATLTVDKSASTAYMELSSLRSEDTAVYYCTR |
| | (ΔE216-K222 | SDGRNDMDSWGQGTLVTVSSASTKGPSVFPLAPSSKSTSGGTAALGCLV |
| | IN HINGE) | KDYFPEPVTVSWNSGALTSGVHTFPAVLQSSGLYSLSSVVTVPSSSLGT |
| | (C226S, | QTYICNVNHKPSNTKVDKKVTHTSPPSPAPELLGGSSVFLFPPKPKDTL |
| | C229S, P238S, | MISRTPEVTCVVVDVSHEDPEVKFNWYVDGVEVHNAKTKPREEQYGSTY |
| | N297G) | RVVSVLTVLHQDWLNGKEYKCKVSNKALPAPIEKTISKAKGQPREPQVY |
| | | TLPPSRDELTKNQVSLTCLVKGFYPSDIAVEWESNGQPENNYKTTPPVL |
| | | DSDGSFFLYSKLTVDKSRWQQGNVFSCSVMHEALHNHYTQKSLSLSPG |
| 159 | TNX10 VH-CH1- | QVQLVQSGAEVVKPGASVKLSCKASGYIFTSYYMYWVKQAPGQGLEWIG |
| | CH2-CH3 IgG1 | EINPSNGDTNFNEKFKSKATLTVDKSASTAYMELSSLRSEDTAVYYCTR |
| | (L234A, | SDGRNDMDSWGQGTLVTVSSASTKGPSVFPLAPSSKSTSGGTAALGCLV |
| | L235A) | KDYFPEPVTVSWNSGALTSGVHTFPAVLQSSGLYSLSSVVTVPSSSLGT |
| | | QTYICNVNHKPSNTKVDKKVEPKSCDKTHTCPPCPAPEAAGGPSVFLFP |
| | | PKPKDTLMISRTPEVTCVVVDVSHEDPEVKFNWYVDGVEVHNAKTKPRE |
| | | EQYNSTYRVVSVLTVLHQDWLNGKEYKCKVSNKALPAPIEKTISKAKGQ |
| | | PREPQVYTLPPSRDELTKNQVSLTCLVKGFYPSDIAVEWESNGQPENNY |
| | | KTTPPVLDSDGSFFLYSKLTVDKSRWQQGNVFSCSVMHEALHNHYTQKS |
| | | LSLSPG |
| 160 | TNX11 VH-CH1- | QVQLVQSGAEVVKPGASVKLSCKASGYIFTSYYMYWVKQAPGQGLEWIG |
| | CH2-CH3 IgG1 | EINPSNGDTNFNEKFKSKATLTVDKSASTAYMELSSLRSEDTAVYYCTR |
| | (C226S, | SDGRNDMDSWGQGTLVTVSSASTKGPSVFPLAPSSKSTSGGTAALGCLV |
| | C229S, P238S) | KDYFPEPVTVSWNSGALTSGVHTFPAVLQSSGLYSLSSVVTVPSSSLGT |
| | | QTYICNVNHKPSNTKVDKKVEPKSCDKTHTSPPSPAPELLGGSSVFLFP |
| | | PKPKDTLMISRTPEVTCVVVDVSHEDPEVKFNWYVDGVEVHNAKTKPRE |
| | | EQYNSTYRVVSVLTVLHQDWLNGKEYKCKVSNKALPAPIEKTISKAKGQ |
| | | PREPQVYTLPPSRDELTKNQVSLTCLVKGFYPSDIAVEWESNGQPENNY |
| | | KTTPPVLDSDGSFFLYSKLTVDKSRWQQGNVFSCSVMHEALHNHYTQKS |
| | | LSLSPG |
| 278 | TNX07 VH-CH1- | QVQLVQSGAEVVKPGASVKLSCKASGYIFTSYYMYWVKQAPGQGLEWIG |
| | CH2-CH3 IgG4 | EINPSNGDTNFNEKFKSKATLTVDKSASTAYMELSSLRSEDTAVYYCTR |
| | (S228P) | SDGRNDMDSWGQGTLVTVSSASTKGPSVFPLAPCSRSTSESTAALGCLV |
| | | KDYFPEPVTVSWNSGALTSGVHTFPAVLQSSGLYSLSSVVTVPSSSLGT |
| | | KTYTCNVDHKPSNTKVDKRVESKYGPPCPPCPAPEFLGGPSVFLFPPKP |
| | | KDTLMISRTPEVTCVVVDVSQEDPEVQFNWYVDGVEVHNAKTKPREEQF |
| | | NSTYRVVSVLTVLHQDWLNGKEYKCKVSNKGLPSSIEKTISKAKGQPRE |
| | | PQVYTLPPSQEEMTKNQVSLTCLVKGFYPSDIAVEWESNGQPENNYKTT |
| | | PPVLDSDGSFFLYSRLTVDKSRWQEGNVFSCSVMHEALHNHYTQKSLSL |
| | | SLG |
| 279 | TNX08 VH-CH1- | QVQLVQSGAEVVKPGASVKLSCKASGYIFTSYYMYWVKQAPGQGLEWIG |
| | CH2-CH3 IgG4 | EINPSNGDTNFNEKFKSKATLTVDKSASTAYMELSSLRSEDTAVYYCTR |
| | (S228P, | SDGRNDMDSWGQGTLVTVSSASTKGPSVFPLAPCSRSTSESTAALGCLV |
| | L235E) | KDYFPEPVTVSWNSGALTSGVHTFPAVLQSSGLYSLSSVVTVPSSSLGT |
| | | KTYTCNVDHKPSNTKVDKRVESKYGPPCPPCPAPEFEGGPSVFLFPPKP |
| | | KDTLMISRTPEVTCVVVDVSQEDPEVQFNWYVDGVEVHNAKTKPREEQF |
| | | NSTYRVVSVLTVLHQDWLNGKEYKCKVSNKGLPSSIEKTISKAKGQPRE |
| | | PQVYTLPPSQEEMTKNQVSLTCLVKGFYPSDIAVEWESNGQPENNYKTT |
| | | PPVLDSDGSFFLYSRLTVDKSRWQEGNVFSCSVMHEALHNHYTQKSLSL |
| | | SLG |
| 280 | TNX09 VH-CH1- | QVQLVQSGAEVVKPGASVKLSCKASGYIFTSYYMYWVKQAPGQGLEWIG |
| | CH2-CH3 IgG4 | EINPSNGDTNFNEKFKSKATLTVDKSASTAYMELSSLRSEDTAVYYCTR |
| | (S228P, | SDGRNDMDSWGQGTLVTVSSASTKGPSVFPLAPCSRSTSESTAALGCLV |
| | F234A, L235A) | KDYFPEPVTVSWNSGALTSGVHTFPAVLQSSGLYSLSSWTVPSSSLGT |
| | | KTYTCNVDHKPSNTKVDKRVESKYGPPCPPCPAPEAAGGPSVFLFPPKP |
| | | KDTLMISRTPEVTCVVVDVSQEDPEVQFNWYVDGVEVHNAKTKPREEQF |
| | | NSTYRVVSVLTVLHQDWLNGKEYKCKVSNKGLPSSIEKTISKAKGQPRE |
| | | PQVYTLPPSQEEMTKNQVSLTCLVKGFYPSDIAVEWESNGQPENNYKTT |
| | | PPVLDSDGSFFLYSRLTVDKSRWQEGNVFSCSVMHEALHNHYTQKSLSL |
| | | SLG |
| 281 | TNX12 IgG1 | QVQLVQSGAEVVKPGASVKLSCKASGYIFTSYYMYWVKQAPGQGLEWIG |
| | VH-CH1-CH2- | EINPSNGDTNFNEKFKSKATLTVDKSASTAYMELSSLRSEDTAVYYCTR |
| | CH3 IgG1 | SDGRNDMDSWGQGTLVTVSSASTKGPSVFPLAPSSKSTSGGTAALGCLV |
| | (C229S, | KDYFPEPVTVSWNSGALTSGVHTFPAVLQSSGLYSLSSVVTVPSSSLGT |
| | P238S) | QTYICNVNHKPSNTKVDKKVEPKSCDKTHTCPPSPAPELLGGSSVFLFP |
| | | PKPKDTLMISRTPEVTCVVVDVSHEDPEVKFNWYVDGVEVHNAKTKPRE |
| | | EQYNSTYRVVSVLTVLHQDWLNGKEYKCKVSNKALPAPIEKTISKAKGQ |
| | | PREPQVYTLPPSRDELTKNQVSLTCLVKGFYPSDIAVEWESNGQPENNY |
| | | KTTPPVLDSDGSFFLYSKLTVDKSRWQQGNVFSCSVMHEALHNHYTQKS |
| | | LSLSPG |
| 282 | TNX13 IgG1 | QVQLVQSGAEVVKPGASVKLSCKASGYIFTSYYMYWVKQAPGQGLEWIG |
| | VH-CH1-CH2- | EINPSNGDTNFNEKFKSKATLTVDKSASTAYMELSSLRSEDTAVYYCTR |
| | CH3 IgG1 | SDGRNDMDSWGQGTLVTVSSASTKGPSVFPLAPSSKSTSGGTAALGCLV |
| | (C226S, | KDYFPEPVTVSWNSGALTSGVHTFPAVLQSSGLYSLSSVVTVPSSSLGT |
| | P238S) | QTYICNVNHKPSNTKVDKKVEPKSCDKTHTSPPCPAPELLGGSSVFLFP |
| | | PKPKDTLMISRTPEVTCVVVDVSHEDPEVKFNWYVDGVEVHNAKTKPRE |
| | | EQYNSTYRVVSVLTVLHQDWLNGKEYKCKVSNKALPAPIEKTISKAKGQ |
| | | PREPQVYTLPPSRDELTKNQVSLTCLVKGFYPSDIAVEWESNGQPENNY |
| | | KTTPPVLDSDGSFFLYSKLTVDKSRWQQGNVFSCSVMHEALHNHYTQKS |
| | | LSLSPG |
| 283 | TNX14 VH-CH1- | QVQLVQSGAEVVKPGASVKLSCKASGYIFTSYYMYWVKQAPGQGLEWIG |
| | CH2-CH3 IgG4 | EINPSNGDTNFNEKFKSKATLTVDKSASTAYMELSSLRSEDTAVYYCTR |
| | (L115T, | SDGRNDMDSWGQGTTVTVSSASTKGPSVFPLAPCSRSTSESTAALGCLV |
| | S228P, L235A) | KDYFPEPVTVSWNSGALTSGVHTFPAVLQSSGLYSLSSVVTVPSSSLGT |
| | | KTYTCNVDHKPSNTKVDKRVESKYGPPCPPCPAPEFAGGPSVFLFPPKP |
| | | KDTLMISRTPEVTCVVVDVSQEDPEVQFNWYVDGVEVHNAKTKPREEQF |
| | | NSTYRVVSVLTVLHQDWLNGKEYKCKVSNKGLPSSIEKTISKAKGQPRE |
| | | PQVYTLPPSQEEMTKNQVSLTCLVKGFYPSDIAVEWESNGQPENNYKTT |
| | | PPVLDSDGSFFLYSRLTVDKSRWQEGNVFSCSVMHEALHNHYTQKSLSL |
| | | SLG |

Full-length heavy chain sequences without leader and with terminal K

| | | |
|---|---|---|
| 161 | TNX01 VH-CH1- | QVQLVQSGAEVVKPGASVKLSCKASGYIFTSYYMYWVKQAPGQGLEWIG |
| | CH2-CH3 | EINPSNGDTNFNEKFKSKATLTVDKSASTAYMELSSLRSEDTAVYYCTR |
| | IgG1(N297Q) | SDGRNDMDSWGQGTLVTVSSASTKGPSVFPLAPSSKSTSGGTAALGCLV |
| | | KDYFPEPVTVSWNSGALTSGVHTFPAVLQSSGLYSLSSVVTVPSSSLGT |
| | | QTYICNVNHKPSNTKVDKKVEPKSCDKTHTCPPCPAPELLGGPSVFLFP |
| | | PKPKDTLMISRTPEVTCVVVDVSHEDPEVKFNWYVDGVEVHNAKTKPRE |
| | | EQYQSTYRVVSVLTVLHQDWLNGKEYKCKVSNKALPAPIEKTISKAKGQ |
| | | PREPQVYTLPPSRDELTKNQVSLTCLVKGFYPSDIAVEWESNGQPENNY |
| | | KTTPPVLDSDGSFFLYSKLTVDKSRWQQGNVFSCSVMHEALHNHYTQKS |
| | | LSLSPGK |
| 162 | TNX02 VH-CH1- | QVQLVQSGAEVVKPGASVKLSCKASGYIFTSYYMYWVKQAPGQGLEWIG |
| | CH2-CH3 IgG1 | EINPSNGDTNFNEKFKSKATLTVDKSASTAYMELSSLRSEDTAVYYCTR |
| | (wt) | SDGRNDMDSWGQGTLVTVSSASTKGPSVFPLAPSSKSTSGGTAALGCLV |
| | | KDYFPEPVTVSWNSGALTSGVHTFPAVLQSSGLYSLSSVVTVPSSSLGT |
| | | QTYICNVNHKPSNTKVDKKVEPKSCDKTHTCPPCPAPELLGGPSVFLFP |
| | | PKPKDTLMISRTPEVTCVVVDVSHEDPEVKFNWYVDGVEVHNAKTKPRE |
| | | EQYNSTYRVVSVLTVLHQDWLNGKEYKCKVSNKALPAPIEKTISKAKGQ |
| | | PREPQVYTLPPSRDELTKNQVSLTCLVKGFYPSDIAVEWESNGQPENNY |
| | | KTTPPVLDSDGSFFLYSKLTVDKSRWQQGNVFSCSVMHEALHNHYTQKS |
| | | LSLSPGK |
| 163 | TNX03 VH-CH1- | QVQLVQSGAEVVKPGASVKLSCKASGYIFTSYYMYWVKQAPGQGLEWIG |
| | CH2-CH3 | EINPSNGDTNFNEKFKSKATLTVDKSASTAYMELSSLRSEDTAVYYCTR |
| | IgG1(N297G) | SDGRNDMDSWGQGTLVTVSSASTKGPSVFPLAPSSKSTSGGTAALGCLV |
| | | KDYFPEPVTVSWNSGALTSGVHTFPAVLQSSGLYSLSSVVTVPSSSLGT |
| | | QTYICNVNHKPSNTKVDKKVEPKSCDKTHTCPPCPAPELLGGPSVFLFP |
| | | PKPKDTLMISRTPEVTCVVVDVSHEDPEVKFNWYVDGVEVHNAKTKPRE |
| | | EQYGSTYRVVSVLTVLHQDWLNGKEYKCKVSNKALPAPIEKTISKAKGQ |
| | | PREPQVYTLPPSRDELTKNQVSLTCLVKGFYPSDIAVEWESNGQPENNY |
| | | KTTPPVLDSDGSFFLYSKLTVDKSRWQQGNVFSCSVMHEALHNHYTQKS |
| | | LSLSPGK |
| 164 | TNX04 VH-CH1- | QVQLVQSGAEVVKPGASVKLSCKASGYIFTSYYMYWVKQAPGQGLEWIG |
| | CH2-CH3 IgG1 | EINPSNGDTNFNEKFKSKATLTVDKSASTAYMELSSLRSEDTAVYYCTR |
| | (C220S, | SDGRNDMDSWGQGTLVTVSSASTKGPSVFPLAPSSKSTSGGTAALGCLV |
| | C226S, C229S, | KDYFPEPVTVSWNSGALTSGVHTFPAVLQSSGLYSLSSVVTVPSSSLGT |
| | P238S) | QTYICNVNHKPSNTKVDKKVEPKSSDKTHTSPPSPAPELLGGSSVFLFP |
| | | PKPKDTLMISRTPEVTCVVVDVSHEDPEVKFNWYVDGVEVHNAKTKPRE |
| | | EQYNSTYRVVSVLTVLHQDWLNGKEYKCKVSNKALPAPIEKTISKAKGQ |
| | | PREPQVYTLPPSRDELTKNQVSLTCLVKGFYPSDIAVEWESNGQPENNY |
| | | KTTPPVLDSDGSFFLYSKLTVDKSRWQQGNVFSCSVMHEALHNHYTQKS |
| | | LSLSPGK |
| 165 | TNX05 VH-CH1- | QVQLVQSGAEVVKPGASVKLSCKASGYIFTSYYMYWVKQAPGQGLEWIG |
| | CH2-CH3 IgG4 | EINPSNGDTNFNEKFKSKATLTVDKSASTAYMELSSLRSEDTAVYYCTR |
| | (S228P, | SDGRNDMDSWGQGTLVTVSSASTKGPSVFPLAPCSRSTSESTAALGCLV |
| | L235A) | KDYFPEPVTVSWNSGALTSGVHTFPAVLQSSGLYSLSSVVTVPSSSLGT |
| | | KTYTCNVDHKPSNTKVDKRVESKYGPPCPPCPAPEFAGGPSVFLFPPKP |
| | | KDTLMISRTPEVTCVVVDVSQEDPEVQFNWYVDGVEVHNAKTKPREEQF |
| | | NSTYRVVSVLTVLHQDWLNGKEYKCKVSNKGLPSSIEKTISKAKGQPRE |
| | | PQVYTLPPSQEEMTKNQVSLTCLVKGFYPSDIAVEWESNGQPENNYKTT |
| | | PPVLDSDGSFFLYSRLTVDKSRWQEGNVFSCSVMHEALHNHYTQKSLSL |
| | | SLGK |
| 166 | TNX06 VH-CH1- | QVQLVQSGAEVVKPGASVKLSCKASGYIFTSYYMYWVKQAPGQGLEWIG |
| | CH2-CH3 IgG4 | EINPSNGDTNFNEKFKSKATLTVDKSASTAYMELSSLRSEDTAVYYCTR |
| | Wild Type | SDGRNDMDSWGQGTLVTVSSASTKGPSVFPLAPCSRSTSESTAALGCLV |
| | | KDYFPEPVTVSWNSGALTSGVHTFPAVLQSSGLYSLSSVVTVPSSSLGT |
| | | KTYTCNVDHKPSNTKVDKRVESKYGPPCPSCPAPEFLGGPSVFLFPPKP |
| | | KDTLMISRTPEVTCVVVDVSQEDPEVQFNWYVDGVEVHNAKTKPREEQF |
| | | NSTYRVVSVLTVLHQDWLNGKEYKCKVSNKGLPSSIEKTISKAKGQPRE |
| | | PQVYTLPPSQEEMTKNQVSLTCLVKGFYPSDIAVEWESNGQPENNYKTT |
| | | PPVLDSDGSFFLYSRLTVDKSRWQEGNVFSCSVMHEALHNHYTQKSLSL |
| | | SLGK |
| 167 | VH-CH1-CH2- | QVQLVQSGAEVVKPGASVKLSCKASGYIFTSYYMYWVKQAPGQGLEWIG |
| | CH3 IgG2 Wild | EINPSNGDTNFNEKFKSKATLTVDKSASTAYMELSSLRSEDTAVYYCTR |
| | Type | SDGRNDMDSWGQGTLVTVSSASTKGPSVFPLAPCSRSTSESTAALGCLV |
| | | KDYFPEPVTVSWNSGALTSGVHTFPAVLQSSGLYSLSSVVTVTSSNFGT |
| | | QTYTCNVDHKPSNTKVDKTVERKCCVECPPCPAPPVAGPSVFLFPPKPK |
| | | DTLMISRTPEVTCVVVDVSHEDPEVQFNWYVDGMEVHNAKTKPREEQFN |
| | | STFRVVSVLTVVHQDWLNGKEYKCKVSNKGLPAPIEKTISKTKGQPREP |
| | | QVYTLPPSREEMTKNQVSLTCLVKGFYPSDIAVEWESNGQPENNYKTTP |
| | | PMLDSDGSFFLYSKLTVDKSRWQQGNVFSCSVMHEALHNHYTQKSLSLS |
| | | PGK |
| 168 | VH-CH1-CH2- | QVQLVQSGAEVVKPGASVKLSCKASGYIFTSYYMYWVKQAPGQGLEWIG |
| | CH3 IgG1 | EINPSNGDTNFNEKFKSKATLTVDKSASTAYMELSSLRSEDTAVYYCTR |
| | (ΔE216-K222 | SDGRNDMDSWGQGTLVTVSSASTKGPSVFPLAPSSKSTSGGTAALGCLV |
| | IN HINGE) | KDYFPEPVTVSWNSGALTSGVHTFPAVLQSSGLYSLSSVVTVPSSSLGT |
| | (C226S, | QTYICNVNHKPSNTKVDKKVTHTSPPSPAPELLGGSSVFLFPPKPKDTL |
| | C229S, P238S) | MISRTPEVTCVVVDVSHEDPEVKFNWYVDGVEVHNAKTKPREEQYNSTY |
| | | RVVSVLTVLHQDWLNGKEYKCKVSNKALPAPIEKTISKAKGQPREPQVY |
| | | TLPPSRDELTKNQVSLTCLVKGFYPSDIAVEWESNGQPENNYKTTPPVL |
| | | DSDGSFFLYSKLTVDKSRWQQGNVFSCSVMHEALHNHYTQKSLSLSPGK |
| 169 | VH-CH1-CH2- | QVQLVQSGAEVVKPGASVKLSCKASGYIFTSYYMYWVKQAPGQGLEWIG |
| | CH3 IgG1 | EINPSNGDTNFNEKFKSKATLTVDKSASTAYMELSSLRSEDTAVYYCTR |
| | (C220S, | SDGRNDMDSWGQGTLVTVSSASTKGPSVFPLAPSSKSTSGGTAALGCLV |
| | C226S, C229S, | KDYFPEPVTVSWNSGALTSGVHTFPAVLQSSGLYSLSSVVTVPSSSLGT |
| | P238S, N297Q) | QTYICNVNHKPSNTKVDKKVEPKSSDKTHTSPPSPAPELLGGSSVFLFP |
| | | PKPKDTLMISRTPEVTCVVVDVSHEDPEVKFNWYVDGVEVHNAKTKPRE |
| | | EQYQSTYRVVSVLTVLHQDWLNGKEYKCKVSNKALPAPIEKTISKAKGQ |
| | | PREPQVYTLPPSRDELTKNQVSLTCLVKGFYPSDIAVEWESNGQPENNY |
| | | KTTPPVLDSDGSFFLYSKLTVDKSRWQQGNVFSCSVMHEALHNHYTQKS |
| | | LSLSPGK |
| 170 | VH-CH1-CH2- | QVQLVQSGAEVVKPGASVKLSCKASGYIFTSYYMYWVKQAPGQGLEWIG |
| | CH3 IgG1 | EINPSNGDTNFNEKFKSKATLTVDKSASTAYMELSSLRSEDTAVYYCTR |
| | (ΔE216-K222 | SDGRNDMDSWGQGTLVTVSSASTKGPSVFPLAPSSKSTSGGTAALGCLV |
| | IN HINGE) | KDYFPEPVTVSWNSGALTSGVHTFPAVLQSSGLYSLSSVVTVPSSSLGT |
| | (C226S, | QTYICNVNHKPSNTKVDKKVTHTSPPSPAPELLGGSSVFLFPPKPKDTL |
| | C229S, P238S, | MISRTPEVTCVVVDVSHEDPEVKFNWYVDGVEVHNAKTKPREEQYQSTY |
| | N297Q) | RVVSVLTVLHQDWLNGKEYKCKVSNKALPAPIEKTISKAKGQPREPQVY |
| | | TLPPSRDELTKNQVSLTCLVKGFYPSDIAVEWESNGQPENNYKTTPPVL |
| | | DSDGSFFLYSKLTVDKSRWQQGNVFSCSVMHEALHNHYTQKSLSLSPGK |
| 171 | VH-CH1-CH2- | QVQLVQSGAEVVKPGASVKLSCKASGYIFTSYYMYWVKQAPGQGLEWIG |
| | CH3 IgG1 | EINPSNGDTNFNEKFKSKATLTVDKSASTAYMELSSLRSEDTAVYYCTR |
| | (C220S, | SDGRNDMDSWGQGTLVTVSSASTKGPSVFPLAPSSKSTSGGTAALGCLV |
| | C226S, C229S, | KDYFPEPVTVSWNSGALTSGVHTFPAVLQSSGLYSLSSVVTVPSSSLGT |
| | P238S, N297G) | QTYICNVNHKPSNTKVDKKVEPKSSDKTHTSPPSPAPELLGGSSVFLFP |
| | | PKPKDTLMISRTPEVTCVVVDVSHEDPEVKFNWYVDGVEVHNAKTKPRE |
| | | EQYGSTYRVVSVLTVLHQDWLNGKEYKCKVSNKALPAPIEKTISKAKGQ |
| | | PREPQVYTLPPSRDELTKNQVSLTCLVKGFYPSDIAVEWESNGQPENNY |
| | | KTTPPVLDSDGSFFLYSKLTVDKSRWQQGNVFSCSVMHEALHNHYTQKS |
| | | LSLSPGK |
| 172 | VH-CH1-CH2- | QVQLVQSGAEVVKPGASVKLSCKASGYIFTSYYMYWVKQAPGQGLEWIG |
| | CH3 IgG1 | EINPSNGDTNFNEKFKSKATLTVDKSASTAYMELSSLRSEDTAVYYCTR |
| | (ΔE216-K222 | SDGRNDMDSWGQGTLVTVSSASTKGPSVFPLAPSSKSTSGGTAALGCLV |
| | IN HINGE) | KDYFPEPVTVSWNSGALTSGVHTFPAVLQSSGLYSLSSVVTVPSSSLGT |
| | (C226S, | QTYICNVNHKPSNTKVDKKVTHTSPPSPAPELLGGSSVFLFPPKPKDTL |
| | C229S, P238S, | MISRTPEVTCVVVDVSHEDPEVKFNWYVDGVEVHNAKTKPREEQYGSTY |
| | N297G) | RVVSVLTVLHQDWLNGKEYKCKVSNKALPAPIEKTISKAKGQPREPQVY |
| | | TLPPSRDELTKNQVSLTCLVKGFYPSDIAVEWESNGQPENNYKTTPPVL |
| | | DSDGSFFLYSKLTVDKSRWQQGNVFSCSVMHEALHNHYTQKSLSLSPGK |
| 173 | TNX10 VH-CH1- | QVQLVQSGAEVVKPGASVKLSCKASGYIFTSYYMYWVKQAPGQGLEWIG |
| | CH2-CH3 IgG1 | EINPSNGDTNFNEKFKSKATLTVDKSASTAYMELSSLRSEDTAVYYCTR |
| | (L234A, | SDGRNDMDSWGQGTLVTVSSASTKGPSVFPLAPSSKSTSGGTAALGCLV |
| | L235A) | KDYFPEPVTVSWNSGALTSGVHTFPAVLQSSGLYSLSSVVTVPSSSLGT |
| | | QTYICNVNHKPSNTKVDKKVEPKSCDKTHTCPPCPAPEAAGGPSVFLFP |
| | | PKPKDTLMISRTPEVTCVVVDVSHEDPEVKFNWYVDGVEVHNAKTKPRE |
| | | EQYNSTYRVVSVLTVLHQDWLNGKEYKCKVSNKALPAPIEKTISKAKGQ |
| | | PREPQVYTLPPSRDELTKNQVSLTCLVKGFYPSDIAVEWESNGQPENNY |
| | | KTTPPVLDSDGSFFLYSKLTVDKSRWQQGNVFSCSVMHEALHNHYTQKS |
| | | LSLSPGK |
| 174 | TNX11 VH-CH1- | QVQLVQSGAEVVKPGASVKLSCKASGYIFTSYYMYWVKQAPGQGLEWIG |
| | CH2-CH3 IgG1 | EINPSNGDTNFNEKFKSKATLTVDKSASTAYMELSSLRSEDTAVYYCTR |
| | (C226S, | SDGRNDMDSWGQGTLVTVSSASTKGPSVFPLAPSSKSTSGGTAALGCLV |
| | C229S, P238S) | KDYFPEPVTVSWNSGALTSGVHTFPAVLQSSGLYSLSSVVTVPSSSLGT |
| | | QTYICNVNHKPSNTKVDKKVEPKSCDKTHTSPPSPAPELLGGSSVFLFP |
| | | PKPKDTLMISRTPEVTCVVVDVSHEDPEVKFNWYVDGVEVHNAKTKPRE |
| | | EQYNSTYRVVSVLTVLHQDWLNGKEYKCKVSNKALPAPIEKTISKAKGQ |
| | | PREPQVYTLPPSRDELTKNQVSLTCLVKGFYPSDIAVEWESNGQPENNY |
| | | KTTPPVLDSDGSFFLYSKLTVDKSRWQQGNVFSCSVMHEALHNHYTQKS |
| | | LSLSPGK |
| 284 | TNX08 VH-CH1- | QVQLVQSGAEVVKPGASVKLSCKASGYIFTSYYMYWVKQAPGQGLEWIG |
| | CH2-CH3 IgG4 | EINPSNGDTNFNEKFKSKATLTVDKSASTAYMELSSLRSEDTAVYYCTR |
| | (S228P, | SDGRNDMDSWGQGTLVTVSSASTKGPSVFPLAPCSRSTSESTAALGCLV |
| | L235E) | KDYFPEPVTVSWNSGALTSGVHTFPAVLQSSGLYSLSSVVTVPSSSLGT |
| | | KTYTCNVDHKPSNTKVDKRVESKYGPPCPPCPAPEFEGGPSVFLFPPKP |
| | | KDTLMISRTPEVTCVVVDVSQEDPEVQFNWYVDGVEVHNAKTKPREEQF |
| | | NSTYRVVSVLTVLHQDWLNGKEYKCKVSNKGLPSSIEKTISKAKGQPRE |
| | | PQVYTLPPSQEEMTKNQVSLTCLVKGFYPSDIAVEWESNGQPENNYKTT |
| | | PPVLDSDGSFFLYSRLTVDKSRWQEGNVFSCSVMHEALHNHYTQKSLSL |
| | | SLGK |
| 285 | TNX09 VH-CH1- | QVQLVQSGAEVVKPGASVKLSCKASGYIFTSYYMYWVKQAPGQGLEWIG |
| | CH2-CH3 IgG4 | EINPSNGDTNFNEKFKSKATLTVDKSASTAYMELSSLRSEDTAVYYCTR |
| | (S228P, | SDGRNDMDSWGQGTLVTVSSASTKGPSVFPLAPCSRSTSESTAALGCLV |
| | F234A, L235A) | KDYFPEPVTVSWNSGALTSGVHTFPAVLQSSGLYSLSSVVTVPSSSLGT |
| | | KTYTCNVDHKPSNTKVDKRVESKYGPPCPPCPAPEAAGGPSVFLFPPKP |
| | | KDTLMISRTPEVTCVVVDVSQEDPEVQFNWYVDGVEVHNAKTKPREEQF |
| | | NSTYRVVSVLTVLHQDWLNGKEYKCKVSNKGLPSSIEKTISKAKGQPRE |
| | | PQVYTLPPSQEEMTKNQVSLTCLVKGFYPSDIAVEWESNGQPENNYKTT |
| | | PPVLDSDGSFFLYSRLTVDKSRWQEGNVFSCSVMHEALHNHYTQKSLSL |
| | | SLGK |
| 286 | TNX12 IgG1 | QVQLVQSGAEVVKPGASVKLSCKASGYIFTSYYMYWVKQAPGQGLEWIG |
| | VH-CH1-CH2- | EINPSNGDTNFNEKFKSKATLTVDKSASTAYMELSSLRSEDTAVYYCTR |
| | CH3 IgG1 | SDGRNDMDSWGQGTLVTVSSASTKGPSVFPLAPSSKSTSGGTAALGCLV |
| | (C229S, | KDYFPEPVTVSWNSGALTSGVHTFPAVLQSSGLYSLSSVVTVPSSSLGT |
| | P238S) | QTYICNVNHKPSNTKVDKKVEPKSCDKTHTCPPSPAPELLGGSSVFLFP |
| | | PKPKDTLMISRTPEVTCVVVDVSHEDPEVKFNWYVDGVEVHNAKTKPRE |
| | | EQYNSTYRVVSVLTVLHQDWLNGKEYKCKVSNKALPAPIEKTISKAKGQ |
| | | PREPQVYTLPPSRDELTKNQVSLTCLVKGFYPSDIAVEWESNGQPENNY |
| | | KTTPPVLDSDGSFFLYSKLTVDKSRWQQGNVFSCSVMHEALHNHYTQKS |
| | | LSLSPGK |
| 287 | TNX13 IgG1 | QVQLVQSGAEVVKPGASVKLSCKASGYIFTSYYMYWVKQAPGQGLEWIG |
| | VH-CH1-CH2- | EINPSNGDTNFNEKFKSKATLTVDKSASTAYMELSSLRSEDTAVYYCTR |
| | CH3 IgG1 | SDGRNDMDSWGQGTLVTVSSASTKGPSVFPLAPSSKSTSGGTAALGCLV |
| | (C226S, | KDYFPEPVTVSWNSGALTSGVHTFPAVLQSSGLYSLSSVVTVPSSSLGT |
| | P238S) | QTYICNVNHKPSNTKVDKKVEPKSCDKTHTSPPCPAPELLGGSSVFLFP |
| | | PKPKDTLMISRTPEVTCVVVDVSHEDPEVKFNWYVDGVEVHNAKTKPRE |
| | | EQYNSTYRVVSVLTVLHQDWLNGKEYKCKVSNKALPAPIEKTISKAKGQ |
| | | PREPQVYTLPPSRDELTKNQVSLTCLVKGFYPSDIAVEWESNGQPENNY |
| | | KTTPPVLDSDGSFFLYSKLTVDKSRWQQGNVFSCSVMHEALHNHYTQKS |
| | | LSLSPGK |
| 288 | TNX14 VH-CH1- | QVQLVQSGAEVVKPGASVKLSCKASGYIFTSYYMYWVKQAPGQGLEWIG |
| | CH2-CH3 IgG4 | EINPSNGDTNFNEKFKSKATLTVDKSASTAYMELSSLRSEDTAVYYCTR |
| | (L115T, | SDGRNDMDSWGQGTTVTVSSASTKGPSVFPLAPCSRSTSESTAALGCLV |
| | S228P, L235A) | KDYFPEPVTVSWNSGALTSGVHTFPAVLQSSGLYSLSSVVTVPSSSLGT |
| | | KTYTCNVDHKPSNTKVDKRVESKYGPPCPPCPAPEFAGGPSVFLFPPKP |
| | | KDTLMISRTPEVTCVVVDVSQEDPEVQFNWYVDGVEVHNAKTKPREEQF |
| | | NSTYRVVSVLTVLHQDWLNGKEYKCKVSNKGLPSSIEKTISKAKGQPRE |
| | | PQVYTLPPSQEEMTKNQVSLTCLVKGFYPSDIAVEWESNGQPENNYKTT |
| | | PPVLDSDGSFFLYSRLTVDKSRWQEGNVFSCSVMHEALHNHYTQKSLSL |
| | | SLGK |

Heavy chain DNA sequences corresponding WITH LEADER, no terminal K

| | | |
|---|---|---|
| 175 | TNX01 VH-CH1- | ATGCCACTGCTGCTGCTGCTGCCACTGCTGTGGGCTGGCGCTCTGGCTC |
| | CH2-CH3 | AGGTGCAGCTGGTGCAGTCTGGAGCTGAGGTGGTGAAGCCAGGCGCCTC |
| | IgG1(N297Q) | TGTGAAGCTGTCCTGCAAGGCTAGCGGCTACATCTTCACCTCCTACTAT |
| | (no terminal | ATGTATTGGGTGAAGCAGGCTCCTGGACAGGGACTGGAGTGGATCGGCG |
| | K) | AGATCAACCCATCTAATGGCGACACCAACTTCAATGAGAAGTTTAAGTC |
| | | CAAGGCTACCCTGACAGTGGATAAGTCCGCCTCTACAGCCTACATGGAG |
| | | CTGTCCAGCCTGAGAAGCGAGGACACCGCCGTGTACTATTGCACAAGGT |
| | | CTGATGGCCGGAACGACATGGATTCCTGGGGCCAGGGCACCCTGGTGAC |
| | | AGTGTCTTCCGCTTCTACCAAGGGCCCTTCCGTGTTTCCACTGGCTCCA |
| | | AGCTCTAAGTCCACCAGCGGAGGAACAGCCGCTCTGGGCTGTCTGGTGA |
| | | AGGACTATTTCCCTGAGCCAGTGACAGTGAGCTGGAACTCTGGCGCTCT |
| | | GACCTCCGGCGTGCACACATTTCCAGCCGTGCTGCAGTCCAGCGGCCTG |
| | | TACAGCCTGTCTTCCGTGGTGACCGTGCCAAGCTCTTCCCTGGGCACCC |
| | | AGACATATATCTGCAACGTGAATCATAAGCCCTCTAATACAAAGGTGGA |
| | | CAAGAAGGTGGAGCCCAAGTCTTGTGATAAAACACATACTTGCCCCCCT |
| | | TGTCCTGCACCAGAACTGCTGGGAGGACCTAGCGTGTTCCTGTTTCCAC |
| | | CCAAGCCAAAAGACACCCTGATGATTAGTAGAACCCCTGAGGTCACATG |
| | | CGTGGTCGTGGACGTGAGCCACGAGGACCCCGAGGTGAAGTTCAACTGG |
| | | TACGTGGACGGCGTGGAGGTGCACAATGCTAAGACCAAGCCCAGAGAGG |
| | | AGCAGTACCAGAGCACCTATCGCGTGGTGTCTGTGCTGACAGTGCTGCA |
| | | TCAGGATTGGCTGAACGGCAAGGAGTATAAGTGCAAGGTGAGCAATAAG |
| | | GCTCTGCCCGCCCCTATCGAGAAGACCATCTCTAAGGCTAAGGGCCAGC |
| | | CTAGGGAGCCACAGGTGTACACACTGCCCCCTTCCCGGGACGAGCTGAC |
| | | CAAGAACCAGGTGAGCCTGACATGTCTGGTGAAGGGCTTCTATCCCAGC |
| | | GATATCGCCGTGGAGTGGGAGTCTAATGGCCAGCCTGAGAACAATTACA |
| | | AGACCACACCACCCGTGCTGGACTCCGATGGCAGCTTCTTTCTGTATTC |
| | | CAAGCTGACCGTGGATAAGAGCCGCTGGCAGCAGGGCAACGTGTTTTCT |
| | | TGTTCCGTGATGCACGAGGCCCTGCACAATCATTACACACAGAAGAGCC |
| | | TGTCTCTGTCCCCTGGC |
| 176 | TNX02 VH-CH1- | ATGCCCCTGCTGCTGCTGCTGCCTCTGCTGTGGGCTGGCGCTCTGGCTC |
| | CH2-CH3 IgG1 | AGGTGCAGCTGGTGCAGTCCGGAGCTGAGGTGGTGAAGCCAGGAGCCTC |
| | (wt) (no | TGTGAAGCTGTCCTGCAAGGCTAGCGGCTACATCTTCACCAGCTACTAT |
| | terminal K) | ATGTATTGGGTGAAGCAGGCTCCAGGACAGGGCCTGGAGTGGATCGGCG |
| | | AGATCAACCCTTCTAATGGCGACACCAACTTCAATGAGAAGTTTAAGTC |
| | | CAAGGCTACCCTGACAGTGGATAAGTCCGCCTCTACAGCCTACATGGAG |
| | | CTGTCCAGCCTGAGGTCTGAGGACACCGCCGTGTACTATTGCACAAGGT |
| | | CTGATGGCCGGAACGACATGGATTCCTGGGGCCAGGGCACCCTGGTGAC |
| | | AGTGTCTTCCGCTTCTACCAAGGGACCATCCGTGTTTCCACTGGCTCCA |
| | | AGCTCTAAGTCCACCAGCGGAGGAACAGCCGCTCTGGGCTGTCTGGTGA |
| | | AGGACTATTTCCCAGAGCCCGTGACAGTGAGCTGGAACTCTGGCGCTCT |
| | | GACCAGCGGCGTGCACACATTTCCAGCCGTGCTGCAGTCCAGCGGCCTG |
| | | TACTCTCTGTCTTCCGTGGTGACCGTGCCTAGCTCTTCCCTGGGCACCC |
| | | AGACATATATCTGCAACGTGAATCACAAGCCTAGCAATACAAAGGTGGA |
| | | CAAGAAGGTGGAGCCAAAGTCTTGTGATAAGACCCATACATGCCCCCCT |
| | | TGTCCTGCTCCAGAGCTGCTGGGAGGACCATCCGTGTTCCTGTTTCCAC |
| | | CCAAGCCCAAGGACACCCTGATGATCTCCAGAACCCCTGAGGTGACATG |
| | | CGTGGTGGTGGACGTGAGCCACGAGGACCCCGAGGTGAAGTTCAACTGG |
| | | TACGTGGATGGCGTGGAGGTGCATAATGCCAAGACCAAGCCTAGAGAGG |
| | | AGCAGTACAATAGCACCTATCGCGTGGTGTCTGTGCTGACAGTGCTGCA |
| | | CCAGGACTGGCTGAACGGCAAGGAGTATAAGTGCAAGGTGTCTAATAAG |
| | | GCTCTGCCCGCCCCTATCGAGAAGACCATCTCCAAGGCTAAGGGCCAGC |
| | | CTAGGGAGCCACAGGTGTACACACTGCCTCCATCCCGGGACGAGCTGAC |
| | | CAAGAACCAGGTGAGCCTGACATGTCTGGTGAAGGGCTTCTATCCAAGC |
| | | GATATCGCCGTGGAGTGGGAGTCTAATGGCCAGCCCGAGAACAATTACA |
| | | AGACCACACCCCCTGTGCTGGACTCCGATGGCAGCTTCTTTCTGTATTC |
| | | CAAGCTGACCGTGGATAAGAGCCGCTGGCAGCAGGGCAACGTGTTTTCT |
| | | TGTTCCGTGATGCATGAGGCTCTGCACAATCATTACACACAGAAGAGCC |
| | | TGTCTCTGTCCCCAGGC |
| 177 | TNX03 VH-CH1- | ATGCCCCTGCTGCTGCTGCTGCCTCTGCTGTGGGCTGGCGCTCTGGCTC |
| | CH2-CH3 | AGGTGCAGCTGGTGCAGTCCGGAGCTGAGGTGGTGAAGCCAGGAGCCTC |
| | IgG1(N297G) | TGTGAAGCTGTCCTGCAAGGCTAGCGGCTACATCTTCACCAGCTACTAT |
| | (no terminal | ATGTATTGGGTGAAGCAGGCTCCAGGACAGGGCCTGGAGTGGATCGGCG |
| | K) | AGATCAACCCTTCTAATGGCGACACCAACTTCAATGAGAAGTTTAAGTC |
| | | CAAGGCTACCCTGACAGTGGATAAGTCCGCCTCTACAGCCTACATGGAG |
| | | CTGTCCAGCCTGAGGTCTGAGGACACCGCCGTGTACTATTGCACAAGGT |
| | | CTGATGGCCGGAACGACATGGATTCCTGGGGCCAGGGCACCCTGGTGAC |
| | | AGTGTCTTCCGCTTCTACCAAGGGACCATCCGTGTTTCCACTGGCTCCA |
| | | AGCTCTAAGTCCACCAGCGGAGGAACAGCCGCTCTGGGCTGTCTGGTGA |
| | | AGGACTATTTCCCAGAGCCCGTGACAGTGAGCTGGAACTCTGGCGCTCT |
| | | GACCAGCGGCGTGCACACATTTCCAGCCGTGCTGCAGTCCAGCGGCCTG |
| | | TACTCTCTGTCTTCCGTGGTGACCGTGCCTAGCTCTTCCCTGGGCACCC |
| | | AGACATATATCTGCAACGTGAATCACAAGCCTAGCAATACAAAGGTGGA |
| | | CAAGAAGGTGGAGCCAAAGTCTTGTGATAAGACCCATACATGCCCCCCT |
| | | TGTCCTGCTCCAGAGCTGCTGGGAGGACCATCCGTGTTCCTGTTTCCAC |
| | | CCAAGCCCAAGGACACCCTGATGATCTCCAGAACCCCTGAGGTGACATG |
| | | CGTGGTGGTGGACGTGAGCCACGAGGACCCCGAGGTGAAGTTCAACTGG |
| | | TACGTGGATGGCGTGGAGGTGCATAATGCCAAGACCAAGCCTAGAGAGG |
| | | AGCAGTACGGCAGCACCTATCGCGTGGTGTCTGTGCTGACAGTGCTGCA |
| | | CCAGGACTGGCTGAACGGCAAGGAGTATAAGTGCAAGGTGTCTAATAAG |
| | | GCTCTGCCCGCCCCTATCGAGAAGACCATCTCCAAGGCTAAGGGCCAGC |
| | | CTAGGGAGCCACAGGTGTACACACTGCCTCCATCCCGGGACGAGCTGAC |
| | | CAAGAACCAGGTGAGCCTGACATGTCTGGTGAAGGGCTTCTATCCAAGC |
| | | GATATCGCCGTGGAGTGGGAGTCTAATGGCCAGCCCGAGAACAATTACA |
| | | AGACCACACCCCCTGTGCTGGACTCCGATGGCAGCTTCTTTCTGTATTC |
| | | CAAGCTGACCGTGGATAAGAGCCGCTGGCAGCAGGGCAACGTGTTTTCT |
| | | TGTTCCGTGATGCATGAGGCTCTGCACAATCATTACACACAGAAGAGCC |
| | | TGTCTCTGTCCCCAGGC |
| 178 | TNX04 VH-CH1- | ATGCCCCTGCTGCTGCTGCTGCCTCTGCTGTGGGCTGGCGCTCTGGCTC |
| | CH2-CH3 IgG1 | AGGTGCAGCTGGTGCAGAGCGGAGCTGAGGTGGTGAAGCCAGGAGCCTC |
| | (C220S, | TGTGAAGCTGTCCTGCAAGGCTAGCGGCTACATCTTCACCTCTTACTAT |
| | C226S, C229S, | ATGTATTGGGTGAAGCAGGCTCCAGGACAGGGCCTGGAGTGGATCGGCG |
| | P238S) (no | AGATCAACCCTTCTAATGGCGACACCAACTTCAATGAGAAGTTTAAGTC |
| | terminal K) | CAAGGCTACCCTGACAGTGGATAAGTCTGCTTCCACAGCCTACATGGAG |
| | | CTGTCCAGCCTGAGGTCCGAGGACACCGCCGTGTACTATTGCACAAGGT |
| | | CTGATGGCCGGAACGACATGGATTCCTGGGGCCAGGGCACCCTGGTGAC |
| | | AGTGTCTTCCGCTTCTACCAAGGGACCATCCGTGTTTCCACTGGCTCCA |
| | | AGCTCTAAGAGCACCTCTGGAGGAACAGCCGCTCTGGGATGTCTGGTGA |
| | | AGGACTATTTCCCAGAGCCCGTGACAGTGTCTTGGAACTCCGGCGCTCT |
| | | GACCTCTGGCGTGCACACATTTCCTGCCGTGCTGCAGTCCAGCGGCCTG |
| | | TACTCCCTGTCTTCCGTGGTGACCGTGCCAAGCTCTTCCCTGGGCACCC |
| | | AGACATATATCTGCAAGGTGAATCACAAGCCTTCCAATACAAAGGTGGA |
| | | CAAGAAGGTGGAGCCAAAGAGCTCTGATAAGACCCATACAAGCCCCCCT |
| | | TCTCCTGCTCCAGAGCTGCTGGGAGGCTCCAGCGTGTTCCTGTTTCCAC |
| | | CCAAGCCAAAGGACACCCTGATGATCAGCAGAACCCCCGAGGTGACATG |
| | | CGTGGTGGTGGACGTGTCTCACGAGGACCCCGAGGTGAAGTTCAACTGG |
| | | TACGTGGATGGCGTGGAGGTGCATAATGCCAAGACCAAGCCTAGAGAGG |
| | | AGCAGTACAATAGCACCTATCGCGTGGTGTCTGTGCTGACAGTGCTGCA |
| | | CCAGGACTGGCTGAACGGCAAGGAGTATAAGTGCAAGGTGTCCAATAAG |
| | | GCTCTGCCCGCCCCTATCGAGAAGACCATCAGCAAGGCTAAGGGCCAGC |
| | | CTAGGGAGCCACAGGTGTACACACTGCCTCCATCCCGGGACGAGCTGAC |
| | | CAAGAACCAGGTGAGCCTGACATGTCTGGTGAAGGGCTTCTATCCAAGC |
| | | GATATCGCCGTGGAGTGGGAGTCTAATGGCCAGCCCGAGAACAATTACA |
| | | AGACCACACCCCCTGTGCTGGACTCCGATGGCAGCTTCTTTCTGTATTC |
| | | CAAGCTGACCGTGGATAAGAGCCGCTGGCAGCAGGGCAACGTGTTTTCC |
| | | TGTAGCGTGATGCATGAGGCTCTGCACAATCATTACACACAGAAGTCTC |
| | | TGTCCCTGAGCCCTGGC |
| 179 | TNX05 VH-CH1- | ATGCCCCTGCTGCTGCTGCTGCCTCTGCTGTGGGCTGGCGCTCTGGCTC |
| | CH2-CH3 IgG4 | AGGTGCAGCTGGTGCAGTCTGGAGCTGAGGTGGTGAAGCCTGGAGCTAG |
| | (S228P, | CGTGAAGCTGTCTTGCAAGGCTTCCGGCTACATCTTCACCTCCTACTAT |
| | L235A) (no | ATGTATTGGGTGAAGCAGGCTCCTGGACAGGGCCTGGAGTGGATCGGCG |
| | terminal K) | AGATCAACCCATCCAATGGCGACACAAACTTCAATGAGAAGTTTAAGAG |
| | | CAAGGCTACCCTGACAGTGGATAAGTCCGCCTCTACCGCCTACATGGAG |
| | | CTGTCCAGCCTGAGGAGCGAGGACACAGCCGTGTACTATTGTACCAGGA |
| | | GCGATGGCCGGAACGACATGGATTCTTGGGGCCAGGGCACACTGGTGAC |
| | | CGTGTCTTCCGCTAGCACAAAGGGACCATCCGTGTTCCCACTGGCTCCA |
| | | TGCTCCAGGAGCACATCTGAGTCCACCGCCGCTCTGGGCTGTCTGGTGA |
| | | AGGACTATTTCCCTGAGCCAGTGACCGTGTCCTGGAATAGCGGCGCTCT |
| | | GACATCCGGAGTGCACACCTTTCCAGCCGTGCTGCAGAGCTCTGGCCTG |
| | | TACAGCCTGTCCAGCGTGGTGACAGTGCCTTCTTCCAGCCTGGGCACCA |
| | | AGACATATACCTGCAACGTGGACCATAAGCCATCTAATACCAAGGTGGA |
| | | TAAGAGAGTGGAGTCCAAGTACGGACCACCTTGCCCACCATGTCCAGCT |
| | | CCTGAGTTCGCTGGAGGACCATCCGTGTTCCTGTTTCCTCCAAAGCCCA |
| | | AGGACACCCTGATGATCTCTCGCACACCAGAGGTGACCTGCGTGGTGGT |
| | | GGACGTGTCCCAGGAGGACCCCGAGGTGCAGTTCAACTGGTACGTGGAT |
| | | GGCGTGGAGGTGCACAATGCTAAGACCAAGCCCAGGGAGGAGCAGTTTA |
| | | ACTCCACATACCGGGTGGTGAGCGTGCTGACCGTGCTGCATCAGGATTG |
| | | GCTGAACGGCAAGGAGTATAAGTGCAAGGTGAGCAATAAGGGCCTGCCT |
| | | TCTTCCATCGAGAAGACAATCTCTAAGGCTAAGGGCCAGCCTCGGGAGC |
| | | CACAGGTGTACACCCTGCCCCCTAGCCAGGAGGAGATGACAAAGAACCA |
| | | GGTGTCTCTGACCTGTCTGGTGAAGGGCTTCTATCCCTCCGACATCGCC |
| | | GTGGAGTGGGAGAGCAATGGCCAGCCTGAGAACAATTACAAGACCACAC |
| | | CACCCGTGCTGGACTCTGATGGCTCCTTCTTTCTGTATTCTAGACTGAC |
| | | CGTCGATAAGTCCCGCTGGCAGGAGGGCAACGTGTTTAGCTGCTCTGTG |
| | | ATGCACGAGGCCCTGCACAATCATTACACCCAGAAGTCCCTGAGCCTGT |
| | | CTCTGGGC |
| 289 | TNX06 VH-CH1- | ATGCCTCTGCTGCTGCTGCTGCCTCTGCTGTGGGCCGGTGCTCTGGCTC |
| | CH2-CH3 IgG4 | AGGTCCAGCTGGTCCAGTCAGGGGCTGAAGTGGTCAAACCCGGCGCCAG |
| | (wild type) | CGTGAAGCTGTCTTGCAAGGCTTCCGGCTACATCTTCACCAGCTACTAT |
| | (no terminal | ATGTATTGGGTGAAGCAGGCTCCAGGACAGGGCCTGGAGTGGATCGGCG |
| | K) | AGATCAACCCTTCCAATGGCGACACAAACTTCAATGAGAAGTTTAAGAG |
| | | CAAGGCCACCCTGACAGTGGATAAGAGCGCCTCTACCGCTTACATGGAG |
| | | CTGTCCAGCCTGAGGTCTGAGGACACAGCCGTGTACTATTGTACCAGGA |
| | | GCGATGGCCGGAACGACATGGATTCTTGGGGCCAGGGCACACTGGTGAC |
| | | CGTGTCTTCCGCCAGCACAAAGGGCCCTTCCGTGTTCCCCCTGGCTCCT |
| | | TGCTCCAGGAGCACATCTGAGTCCACCGCCGCTCTGGGCTGTCTGGTGA |
| | | AGGACTACTTCCCAGAGCCCGTGACCGTGTCCTGGAATAGCGGCGCCCT |
| | | GACATCCGGAGTGCACACCTTTCCAGCTGTGCTGCAGAGCTCTGGCCTG |
| | | TACAGCCTGTCCAGCGTGGTGACAGTGCCCTCTTCCAGCCTGGGCACCA |
| | | AGACATATACCTGCAACGTGGACCATAAGCCTTCTAATACCAAGGTGGA |
| | | TAAGAGAGTGGAGTCCAAGTACGGACCACCTTGCCCTAGCTGTCCTGCT |
| | | CCAGAGTTCCTGGGAGGACCTTCCGTGTTCCTGTTTCCACCCAAGCCAA |
| | | AGGACACACTGATGATCTCTCGCACACCTGAGGTGACCTGCGTGGTGGT |
| | | GGACGTGTCCCAGGAgGGACCCCGAGGTGCAGTTCAACTGGTACGTGGA |
| | | TGGCGTGGAGGTGCACAATGCTAAGACCAAGCCAAGGGAGGAGCAGTTT |
| | | AACTCCACATACCGGGTGGTGAGCGTGCTGACCGTGCTGCATCAGGATT |
| | | GGCTGAACGGCAAGGAGTATAAGTGCAAGGTGAGCAATAAGGGCCTGCC |
| | | CTCTTCCATCGAGAAGACAATCTCTAAGGCTAAGGGACAGCCAAGGGAG |
| | | CCACAGGTGTACACCCTGCCTCCAAGCCAGGAGGAGATGACAAAGAACC |
| | | AGGTGTCTCTGACCTGTCTGGTGAAGGGCTTCTATCCATCTGACATCGC |
| | | TGTGGAGTGGGAGTCCAATGGCCAGCCCGAGAACAATTACAAGACCACA |
| | | CCCCCTGTGCTGGACTCTGATGGCTCCTTCTTTCTGTATTCTAGACTGA |
| | | CCGTGGATAAGTCCCGCTGGCAGGAGGGCAACGTGTTCTCCTGCTCTGT |
| | | GATGCACGAAGCACTGCACAATCATTACACTCAGAAGAGCCTGTCACTG |
| | | TCCCTGGGC |
| 290 | TNX07 VH-CH1- | ATGCCTCTGCTGCTGCTGCTGCCTCTGCTGTGGGCCGGTGCTCTGGCTC |
| | CH2-CH3 IgG4 | AGGTCCAGCTGGTCCAGTCAGGGGCTGAAGTGGTCAAACCCGGCGCCAG |
| | (S228P) (no | CGTGAAGCTGTCTTGCAAGGCTTCCGGCTACATCTTCACCAGCTACTAT |
| | terminal K) | ATGTATTGGGTGAAGCAGGCTCCAGGACAGGGCCTGGAGTGGATCGGCG |
| | | AGATCAACCCTTCCAATGGCGACACAAACTTCAATGAGAAGTTTAAGAG |
| | | CAAGGCCACCCTGACAGTGGATAAGAGCGCCTCTACCGCTTACATGGAG |
| | | CTGTCCAGCCTGAGGTCTGAGGACACAGCCGTGTACTATTGTACCAGGA |
| | | GCGATGGCCGGAACGACATGGATTCTTGGGGCCAGGGCACACTGGTGAC |
| | | CGTGTCTTCCGCCAGCACAAAGGGCCCTTCCGTGTTCCCCCTGGCTCCT |
| | | TGCTCCAGGAGCACATCTGAGTCCACCGCCGCTCTGGGCTGTCTGGTGA |
| | | AGGACTACTTCCCAGAGCCCGTGACCGTGTCCTGGAATAGCGGCGCCCT |
| | | GACATCCGGAGTGCACACCTTTCCAGCTGTGCTGCAGAGCTCTGGCCTG |
| | | TACAGCCTGTCCAGCGTGGTGACAGTGCCCTCTTCCAGCCTGGGCACCA |
| | | AGACATATACCTGCAACGTGGACCATAAGCCTTCTAATACCAAGGTGGA |
| | | TAAGAGAGTGGAGTCCAAGTACGGACCACCTTGCCCTCCCTGTCCTGCT |
| | | CCAGAGTTCCTGGGAGGACCTTCCGTGTTCCTGTTTCCACCCAAGCCAA |
| | | AGGACACACTGATGATCTCTCGCACACCTGAGGTGACCTGCGTGGTGGT |
| | | GGACGTGTCCCAGGAGGACCCCGAGGTGCAGTTCAACTGGTACGTGGAT |
| | | GGCGTGGAGGTGCACAATGCTAAGACCAAGCCAAGGGAGGAGCAGTTTA |
| | | ACTCCACATACCGGGTGGTGAGCGTGCTGACCGTGCTGCATCAGGATTG |
| | | GCTGAACGGCAAGGAGTATAAGTGCAAGGTGAGCAATAAGGGCCTGCCC |
| | | TCTTCCATCGAGAAGACAATCTCTAAGGCTAAGGGACAGCCAAGGGAGC |
| | | CACAGGTGTACACCCTGCCTCCAAGCCAGGAGGAGATGACAAAGAACCA |
| | | GGTGTCTCTGACCTGTCTGGTGAAGGGCTTCTATCCATCTGACATCGCT |
| | | GTGGAGTGGGAGTCCAATGGCCAGCCCGAGAACAATTACAAGACCACAC |
| | | CCCCTGTGCTGGACTCTGATGGCTCCTTCTTTCTGTATTCTAGACTGAC |
| | | CGTGGATAAGTCCCGCTGGCAGGAGGGCAACGTGTTCTCCTGCTCTGTG |
| | | ATGCACGAAGCACTGCACAATCATTACACTCAGAAGAGCCTGTCACTGT |
| | | CCCTGGGC |
| 291 | TNX08 VH-CH1- | ATGCCTCTGCTGCTGCTGCTGCCTCTGCTGTGGGCCGGTGCTCTGGCTC |
| | CH2-CH3 (IgG4 | AGGTCCAGCTGGTCCAGTCAGGGGCTGAAGTGGTCAAACCCGGCGCCAG |
| | S228P/L235E) | CGTGAAGCTGTCTTGCAAGGCTTCCGGCTACATCTTCACCAGCTACTAT |
| | (no terminal | ATGTATTGGGTGAAGCAGGCTCCAGGACAGGGCCTGGAGTGGATCGGCG |
| | K) | AGATCAACCCTTCCAATGGCGACACAAACTTCAATGAGAAGTTTAAGAG |
| | | CAAGGCCACCCTGACAGTGGATAAGAGCGCCTCTACCGCTTACATGGAG |
| | | CTGTCCAGCCTGAGGTCTGAGGACACAGCCGTGTACTATTGTACCAGGA |
| | | GCGATGGCCGGAACGACATGGATTCTTGGGGCCAGGGCACACTGGTGAC |
| | | CGTGTCTTCCGCCAGCACAAAGGGCCCTTCCGTGTTCCCCCTGGCTCCT |
| | | TGCTCCAGGAGCACATCTGAGTCCACCGCCGCTCTGGGCTGTCTGGTGA |
| | | AGGACTACTTCCCAGAGCCCGTGACCGTGTCCTGGAATAGCGGCGCCCT |
| | | GACATCCGGAGTGCACACCTTTCCAGCTGTGCTGCAGAGCTCTGGCCTG |
| | | TACAGCCTGTCCAGCGTGGTGACAGTGCCCTCTTCCAGCCTGGGCACCA |
| | | AGACATATACCTGCAACGTGGACCATAAGCCTTCTAATACCAAGGTGGA |
| | | TAAGAGAGTGGAGTCCAAGTACGGACCACCTTGCCCTCCCTGTCCTGCT |
| | | CCAGAGTTCGAGGGAGGACCTTCCGTGTTCCTGTTTCCACCCAAGCCAA |
| | | AGGACACACTGATGATCTCTCGCACACCTGAGGTGACCTGCGTGGTGGT |
| | | GGACGTGTCCCAGGAGGACCCCGAGGTGCAGTTCAACTGGTACGTGGAT |
| | | GGCGTGGAGGTGCACAATGCTAAGACCAAGCCAAGGGAGGAGCAGTTTA |
| | | ACTCCACATACCGGGTGGTGAGCGTGCTGACCGTGCTGCATCAGGATTG |
| | | GCTGAACGGCAAGGAGTATAAGTGCAAGGTGAGCAATAAGGGCCTGCCC |
| | | TCTTCCATCGAGAAGACAATCTCTAAGGCTAAGGGACAGCCAAGGGAGC |
| | | CACAGGTGTACACCCTGCCTCCAAGCCAGGAGGAGATGACAAAGAACCA |
| | | GGTGTCTCTGACCTGTCTGGTGAAGGGCTTCTATCCATCTGACATCGCT |
| | | GTGGAGTGGGAGTCCAATGGCCAGCCCGAGAACAATTACAAGACCACAC |
| | | CCCCTGTGCTGGACTCTGATGGCTCCTTCTTTCTGTATTCTAGACTGAC |
| | | CGTGGATAAGTCCCGCTGGCAGGAGGGCAACGTGTTCTCCTGCTCTGTG |
| | | ATGCACGAAGCACTGCACAATCATTACACTCAGAAGAGCCTGTCACTGT |
| | | CCCTGGGC |
| 292 | TNX09 VH-CH1- | ATGCCTCTGCTGCTGCTGCTGCCTCTGCTGTGGGCCGGTGCTCTGGCTC |
| | CH2-CH3 IgG4 | AGGTCCAGCTGGTCCAGTCAGGGGCTGAAGTGGTCAAACCCGGCGCCAG |
| | (S228P/F234A/ | CGTGAAGCTGTCTTGCAAGGCTTCCGGCTACATCTTCACCAGCTACTAT |
| | L235A) (no | ATGTATTGGGTGAAGCAGGCTCCAGGACAGGGCCTGGAGTGGATCGGCG |
| | terminal K) | AGATCAACCCTTCCAATGGCGACACAAACTTCAATGAGAAGTTTAAGAG |
| | | CAAGGCCACCCTGACAGTGGATAAGAGCGCCTCTACCGCTTACATGGAG |
| | | CTGTCCAGCCTGAGGTCTGAGGACACAGCCGTGTACTATTGTACCAGGA |
| | | GCGATGGCCGGAACGACATGGATTCTTGGGGCCAGGGCACACTGGTGAC |
| | | CGTGTCTTCCGCCAGCACAAAGGGCCCTTCCGTGTTCCCCCTGGCTCCT |
| | | TGCTCCAGGAGCACATCTGAGTCCACCGCCGCTCTGGGCTGTCTGGTGA |
| | | AGGACTACTTCCCAGAGCCCGTGACCGTGTCCTGGAATAGCGGCGCCCT |
| | | GACATCCGGAGTGCACACCTTTCCAGCTGTGCTGCAGAGCTCTGGCCTG |
| | | TACAGCCTGTCCAGCGTGGTGACAGTGCCCTCTTCCAGCCTGGGCACCA |
| | | AGACATATACCTGCAACGTGGACCATAAGCCTTCTAATACCAAGGTGGA |
| | | TAAGAGAGTGGAGTCCAAGTACGGACCACCTTGCCCTCCCTGTCCTGCT |
| | | CCAGAGGCCGCCGGAGGACCTTCCGTGTTCCTGTTTCCACCCAAGCCAA |
| | | AGGACACACTGATGATCTCTCGCACACCTGAGGTGACCTGCGTGGTGGT |
| | | GGACGTGTCCCAGGAGGACCCCGAGGTGCAGTTCAACTGGTACGTGGAT |
| | | GGCGTGGAGGTGCACAATGCTAAGACCAAGCCAAGGGAGGAGCAGTTTA |
| | | ACTCCACATACCGGGTGGTGAGCGTGCTGACCGTGCTGCATCAGGATTG |
| | | GCTGAACGGCAAGGAGTATAAGTGCAAGGTGAGCAATAAGGGCCTGCCC |
| | | TCTTCCATCGAGAAGACAATCTCTAAGGCTAAGGGACAGCCAAGGGAGC |
| | | CACAGGTGTACACCCTGCCTCCAAGCCAGGAGGAGATGACAAAGAACCA |
| | | GGTGTCTCTGACCTGTCTGGTGAAGGGCTTCTATCCATCTGACATCGCT |
| | | GTGGAGTGGGAGTCCAATGGCCAGCCCGAGAACAATTACAAGACCACAC |
| | | CCCCTGTGCTGGACTCTGATGGCTCCTTCTTTCTGTATTCTAGACTGAC |
| | | CGTGGATAAGTCCCGCTGGCAGGAGGGCAACGTGTTCTCCTGCTCTGTG |
| | | ATGCACGAAGCACTGCACAATCATTACACTCAGAAGAGCCTGTCACTGT |
| | | CCCTGGGC |
| 293 | TNX10 VH-CH1- | ATGCCTCTGCTGCTGCTGCTGCCTCTGCTGTGGGCCGGTGCCCTGGCTC |
| | CH2-CH3 IgG1 | AGGTCCAGCTGGTCCAGTCAGGTGCCGAAGTGGTCAAGCCCGGCGCCTC |
| | (L234A/L235A) | TGTGAAGCTGTCCTGCAAGGCTAGCGGCTACATCTTCACCTCCTACTAT |
| | (no terminal | ATGTATTGGGTGAAGCAGGCTCCTGGACAGGGCCTGGAGTGGATCGGCG |
| | K) | AGATCAACCCATCTAATGGCGACACCAACTTCAATGAGAAGTTTAAGTC |
| | | CAAGGCCACCCTGACAGTGGATAAGAGCGCCTCTACAGCTTACATGGAG |
| | | CTGTCCAGCCTGAGGAGCGAGGACACCGCCGTGTACTATTGCACAAGGT |
| | | CTGATGGCCGGAACGACATGGATTCCTGGGGCCAGGGCACCCTGGTGAC |
| | | AGTGTCTTCCGCCTCTACCAAGGGCCCTTCCGTGTTTCCACTGGCTCCC |
| | | AGCTCTAAGTCCACCAGCGGAGGAACAGCCGCTCTGGGCTGTCTGGTGA |
| | | AGGACTACTTCCCAGAGCCCGTGACAGTGAGCTGGAACTCTGGCGCCCT |
| | | GACCAGCGGAGTGCACACATTTCCTGCTGTGCTGCAGTCCAGCGGCCTG |
| | | TACTCTCTGTCTTCCGTGGTGACCGTGCCAAGCTCTTCCCTGGGCACCC |
| | | AGACATATATCTGCAACGTGAATCACAAGCCAAGCAATACAAAGGTGGA |
| | | CAAGAAGGTGGAGCCCAAGTCTTGTGATAAGACCCATACATGCCCCCCT |
| | | TGTCCTGCTCCAGAGGCTGCTGGAGGACCATCCGTGTTCCTGTTTCCAC |
| | | CCAAGCCTAAGGACACCCTGATGATCTCCAGAACCCCAGAGGTGACATG |
| | | CGTGGTGGTGGACGTGAGCCACGAGGACCCCGAGGTGAAGTTCAACTGG |
| | | TACGTGGATGGCGTGGAGGTGCATAATGCTAAGACCAAGCCAAGAGAGG |
| | | AGCAGTACAACAGCACCTATCGCGTGGTGTCTGTGCTGACAGTGCTGCA |
| | | TCAGGACTGGCTGAACGGCAAGGAGTATAAGTGCAAGGTGTCTAATAAG |
| | | GCCCTGCCCGCTCCTATCGAGAAGACCATCTCCAAGGCCAAGGGCCAGC |
| | | CTAGGGAGCCACAGGTGTACACACTGCCTCCATCCCGGGACGAGCTGAC |
| | | CAAGAACCAGGTGAGCCTGACATGTCTGGTGAAGGGCTTCTATCCCAGC |
| | | GATATCGCTGTGGAGTGGGAGTCTAATGGCCAGCCTGAGAACAATTACA |
| | | AGACCACACCCCCTGTGCTGGACTCCGATGGCAGCTTCTTTCTGTATTC |
| | | CAAGCTGACCGTGGATAAGAGCCGCTGGCAGCAGGGCAACGTGTTCTCC |
| | | TGTTCCGTCATGCACGAGGCACTGCACAATCATTACACCCAGAAGTCAC |
| | | TGTCACTGTCACCAGGA |
| 294 | TNX11 VH-CH1- | ATGCCTCTGCTGCTGCTGCTGCCTCTGCTGTGGGCCGGTGCCCTGGCTC |
| | CH2-CH3 IgG1 | AGGTCCAGCTGGTCCAGTCAGGTGCCGAAGTGGTCAAGCCCGGCGCCTC |
| | (C226S, | TGTGAAGCTGTCCTGCAAGGCTAGCGGCTACATCTTCACCTCCTACTAT |
| | C229S, P238S) | ATGTATTGGGTGAAGCAGGCTCCTGGACAGGGCCTGGAGTGGATCGGCG |
| | (no terminal | AGATCAACCCATCTAATGGCGACACCAACTTCAATGAGAAGTTTAAGTC |
| | K) | CAAGGCCACCCTGACAGTGGATAAGAGCGCCTCTACAGCTTACATGGAG |
| | | CTGTCCAGCCTGAGGAGCGAGGACACCGCCGTGTACTATTGCACAAGGT |
| | | CTGATGGCCGGAACGACATGGATTCCTGGGGCCAGGGCACCCTGGTGAC |
| | | AGTGTCTTCCGCCTCTACCAAGGGCCCTTCCGTGTTTCCACTGGCTCCC |
| | | AGCTCTAAGTCCACCAGCGGAGGAACAGCCGCTCTGGGCTGTCTGGTGA |
| | | AGGACTACTTCCCAGAGCCCGTGACAGTGAGCTGGAACTCTGGCGCCCT |
| | | GACCAGCGGAGTGCACACATTTCCTGCTGTGCTGCAGTCCAGCGGCCTG |
| | | TACTCTCTGTCTTCCGTGGTGACCGTGCCAAGCTCTTCCCTGGGCACCC |
| | | AGACATATATCTGCAACGTGAATCACAAGCCAAGCAATACAAAGGTGGA |
| | | CAAGAAGGTGGAGCCCAAGTCTTGTGATAAGACCCATACAtccCCCCCT |
| | | TccCCTGCTCCAGAGCTGCTGGGAGGAAGCTCCGTGTTCCTGTTTCCAC |
| | | CCAAGCCTAAGGACACCCTGATGATCTCCAGAACCCCAGAGGTGACATG |
| | | CGTGGTGGTGGACGTGAGCCACGAGGACCCCGAGGTGAAGTTCAACTGG |
| | | TACGTGGATGGCGTGGAGGTGCATAATGCTAAGACCAAGCCAAGAGAGG |
| | | AGCAGTACAACAGCACCTATCGCGTGGTGTCTGTGCTGACAGTGCTGCA |
| | | TCAGGACTGGCTGAACGGCAAGGAGTATAAGTGCAAGGTGTCTAATAAG |
| | | GCCCTGCCCGCTCCTATCGAGAAGACCATCTCCAAGGCCAAGGGCCAGC |
| | | CTAGGGAGCCACAGGTGTACACACTGCCTCCATCCCGGGACGAGCTGAC |
| | | CAAGAACCAGGTGAGCCTGACATGTCTGGTGAAGGGCTTCTATCCCAGC |
| | | GATATCGCTGTGGAGTGGGAGTCTAATGGCCAGCCTGAGAACAATTACA |
| | | AGACCACACCCCCTGTGCTGGACTCCGATGGCAGCTTCTTTCTGTATTC |
| | | CAAGCTGACCGTGGATAAGAGCCGCTGGCAGCAGGGCAACGTGTTCTCC |
| | | TGTTCCGTCATGCACGAGGCACTGCACAATCATTACACCCAGAAGTCAC |
| | | TGTCACTGTCACCAGGA |
| 295 | TNX12 VH-CH1- | ATGCCTCTGCTGCTGCTGCTGCCTCTGCTGTGGGCCGGTGCCCTGGCTC |
| | CH2-CH3 IgG1 | AGGTCCAGCTGGTCCAGTCAGGTGCCGAAGTGGTCAAGCCCGGCGCCTC |
| | (C229S, | TGTGAAGCTGTCCTGCAAGGCTAGCGGCTACATCTTCACCTCCTACTAT |
| | P238S) (no | ATGTATTGGGTGAAGCAGGCTCCTGGACAGGGCCTGGAGTGGATCGGCG |
| | terminal K) | AGATCAACCCATCTAATGGCGACACCAACTTCAATGAGAAGTTTAAGTC |
| | | CAAGGCCACCCTGACAGTGGATAAGAGCGCCTCTACAGCTTACATGGAG |
| | | CTGTCCAGCCTGAGGAGCGAGGACACCGCCGTGTACTATTGCACAAGGT |
| | | CTGATGGCCGGAACGACATGGATTCCTGGGGCCAGGGCACCCTGGTGAC |
| | | AGTGTCTTCCGCCTCTACCAAGGGCCCTTCCGTGTTTCCACTGGCTCCC |
| | | AGCTCTAAGTCCACCAGCGGAGGAACAGCCGCTCTGGGCTGTCTGGTGA |
| | | AGGACTACTTCCCAGAGCCCGTGACAGTGAGCTGGAACTCTGGCGCCCT |
| | | GACCAGCGGAGTGCACACATTTCCTGCTGTGCTGCAGTCCAGCGGCCTG |
| | | TACTCTCTGTCTTCCGTGGTGACCGTGCCAAGCTCTTCCCTGGGCACCC |
| | | AGACATATATCTGCAACGTGAATCACAAGCCAAGCAATACAAAGGTGGA |
| | | CAAGAAGGTGGAGCCCAAGTCTTGTGATAAGACCCATACATGCCCCCCT |
| | | TCCCCTGCTCCAGAGCTGCTGGGAGGAAGcTCCGTGTTCCTGTTTCCAC |
| | | CCAAGCCTAAGGACACCCTGATGATCTCCAGAACCCCAGAGGTGACATG |
| | | CGTGGTGGTGGACGTGAGCCACGAGGACCCCGAGGTGAAGTTCAACTGG |
| | | TACGTGGATGGCGTGGAGGTGCATAATGCTAAGACCAAGCCAAGAGAGG |
| | | AGCAGTACAACAGCACCTATCGCGTGGTGTCTGTGCTGACAGTGCTGCA |
| | | TCAGGACTGGCTGAACGGCAAGGAGTATAAGTGCAAGGTGTCTAATAAG |
| | | GCCCTGCCCGCTCCTATCGAGAAGACCATCTCCAAGGCCAAGGGCCAGC |
| | | CTAGGGAGCCACAGGTGTACACACTGCCTCCATCCCGGGACGAGCTGAC |
| | | CAAGAACCAGGTGAGCCTGACATGTCTGGTGAAGGGCTTCTATCCCAGC |
| | | GATATCGCTGTGGAGTGGGAGTCTAATGGCCAGCCTGAGAACAATTACA |
| | | AGACCACACCCCCTGTGCTGGACTCCGATGGCAGCTTCTTTCTGTATTC |
| | | CAAGCTGACCGTGGATAAGAGCCGCTGGCAGCAGGGCAACGTGTTCTCC |
| | | TGTTCCGTCATGCACGAGGCACTGCACAATCATTACACCCAGAAGTCAC |
| | | TGTCACTGTCACCAGGA |
| 296 | TNX13 VH-CH1- | ATGCCTCTGCTGCTGCTGCTGCCTCTGCTGTGGGCCGGTGCCCTGGCTC |
| | CH2-CH3 IgG1 | AGGTCCAGCTGGTCCAGTCAGGTGCCGAAGTGGTCAAGCCCGGCGCCTC |
| | (C226S, | TGTGAAGCTGTCCTGCAAGGCTAGCGGCTACATCTTCACCTCCTACTAT |
| | P238S) (no | ATGTATTGGGTGAAGCAGGCTCCTGGACAGGGCCTGGAGTGGATCGGCG |
| | terminal K) | AGATCAACCCATCTAATGGCGACACCAACTTCAATGAGAAGTTTAAGTC |
| | | CAAGGCCACCCTGACAGTGGATAAGAGCGCCTCTACAGCTTACATGGAG |
| | | CTGTCCAGCCTGAGGAGCGAGGACACCGCCGTGTACTATTGCACAAGGT |
| | | CTGATGGCCGGAACGACATGGATTCCTGGGGCCAGGGCACCCTGGTGAC |
| | | AGTGTCTTCCGCCTCTACCAAGGGCCCTTCCGTGTTTCCACTGGCTCCC |
| | | AGCTCTAAGTCCACCAGCGGAGGAACAGCCGCTCTGGGCTGTCTGGTGA |
| | | AGGACTACTTCCCAGAGCCCGTGACAGTGAGCTGGAACTCTGGCGCCCT |
| | | GACCAGCGGAGTGCACACATTTCCTGCTGTGCTGCAGTCCAGCGGCCTG |
| | | TACTCTCTGTCTTCCGTGGTGACCGTGCCAAGCTCTTCCCTGGGCACCC |
| | | AGACATATATCTGCAACGTGAATCACAAGCCAAGCAATACAAAGGTGGA |
| | | CAAGAAGGTGGAGCCCAAGTCTTGTGATAAGACCCATACATCCCCCCCT |
| | | TGCCCTGCTCCAGAGCTGCTGGGAGGAAGCTCCGTGTTCCTGTTTCCAC |
| | | CCAAGCCTAAGGACACCCTGATGATCTCCAGAACCCCAGAGGTGACATG |
| | | CGTGGTGGTGGACGTGAGCCACGAGGACCCCGAGGTGAAGTTCAACTGG |
| | | TACGTGGATGGCGTGGAGGTGCATAATGCTAAGACCAAGCCAAGAGAGG |
| | | AGCAGTACAACAGCACCTATCGCGTGGTGTCTGTGCTGACAGTGCTGCA |
| | | TCAGGACTGGCTGAACGGCAAGGAGTATAAGTGCAAGGTGTCTAATAAG |
| | | GCCCTGCCCGCTCCTATCGAGAAGACCATCTCCAAGGCCAAGGGCCAGC |
| | | CTAGGGAGCCACAGGTGTACACACTGCCTCCATCCCGGGACGAGCTGAC |
| | | CAAGAACCAGGTGAGCCTGACATGTCTGGTGAAGGGCTTCTATCCCAGC |
| | | GATATCGCTGTGGAGTGGGAGTCTAATGGCCAGCCTGAGAACAATTACA |
| | | AGACCACACCCCCTGTGCTGGACTCCGATGGCAGCTTCTTTCTGTATTC |
| | | CAAGCTGACCGTGGATAAGAGCCGCTGGCAGCAGGGCAACGTGTTCTCC |
| | | TGTTCCGTCATGCACGAGGCACTGCACAATCATTACACCCAGAAGTCAC |
| | | TGTCACTGTCACCAGGA |
| 297 | TNX14 VH-CH1- | ATGCCTCTGCTGCTGCTGCTGCCTCTGCTGTGGGCCGGTG |
| | CH2-CH3 IgG4 | CTCTGGCTCAGGTCCAGCTGGTCCAGTCAGGGGCTGAAGT |
| | (L115T, | GGTCAAACCCGGCGCCAGCGTGAAGCTGTCTTGCAAGGCT |
| | S228P, L235A) | TCCGGCTACATCTTCACCAGCTACTATATGTATTGGGTGA |
| | (no terminal | AGCAGGCTCCAGGACAGGGCCTGGAGTGGATCGGCGAGAT |
| | K) | CAACCCTTCCAATGGCGACACAAACTTCAATGAGAAGTTT |
| | | AAGAGCAAGGCCACCCTGACAGTGGATAAGAGCGCCTCTA |
| | | CCGCTTACATGGAGCTGTCCAGCCTGAGGTCTGAGGACAC |
| | | AGCCGTGTACTATTGTACCAGGAGCGATGGCCGGAACGAC |
| | | ATGGATTCTTGGGGCCAGGGCACAACAGTGACCGTGTCTT |
| | | CCGCCAGCACAAAGGGCCCTTCCGTGTTCCCCCTGGCTCC |
| | | TTGCTCCAGGAGCACATCTGAGTCCACCGCCGCTCTGGGC |
| | | TGTCTGGTGAAGGACTACTTCCCAGAGCCCGTGACCGTGT |
| | | CCTGGAATAGCGGCGCCCTGACATCCGGAGTGCACACCTT |
| | | TCCAGCTGTGCTGCAGAGCTCTGGCCTGTACAGCCTGTCC |
| | | AGCGTGGTGACAGTGCCCTCTTCCAGCCTGGGCACCAAGA |
| | | CATATACCTGCAACGTGGACCATAAGCCTTCTAATACCAA |
| | | GGTGGATAAGAGAGTGGAGTCCAAGTACGGACCACCTTGC |
| | | CCTCCTTGTCCTGCTCCAGAGTTCGCCGGAGGACCTTCCG |
| | | TGTTCCTGTTTCCACCCAAGCCAAAGGACACACTGATGAT |
| | | CTCTCGCACACCTGAGGTGACCTGCGTGGTGGTGGACGTG |
| | | TCCCAGGAGGACCCCGAGGTGCAGTTCAACTGGTACGTGG |
| | | ATGGCGTGGAGGTGCACAATGCTAAGACCAAGCCAAGGGA |
| | | GGAGCAGTTTAACTCCACATACCGGGTGGTGAGCGTGCTG |
| | | ACCGTGCTGCATCAGGATTGGCTGAACGGCAAGGAGTATA |
| | | AGTGCAAGGTGAGCAATAAGGGCCTGCCCTCTTCCATCGA |
| | | GAAGACAATCTCTAAGGCTAAGGGACAGCCAAGGGAGCCA |
| | | CAGGTGTACACCCTGCCTCCAAGCCAGGAGGAGATGACAA |
| | | AGAACCAGGTGTCTCTGACCTGTCTGGTGAAGGGCTTCTA |
| | | TCCATCTGACATCGCTGTGGAGTGGGAGTCCAATGGCCAG |
| | | CCCGAGAACAATTACAAGACCACACCCCCTGTGCTGGACT |
| | | CTGATGGCTCCTTCTTTCTGTATTCTAGACTGACCGTGGA |
| | | TAAGTCCCGCTGGCAGGAGGGCAACGTGTTCTCCTGCTCT |
| | | GTGATGCACGAAGCACTGCACAATCATTACACTCAGAAGA |
| | | GCCTGTCACTGTCCCTGGGC |

Heavy chain DNA sequences WITHOUT LEADER; no terminal K

| | | |
|---|---|---|
| 180 | TNX01 VH-CH1- | CAGGTGCAGCTGGTGCAGTCTGGAGCTGAGGTGGTGAAGCCAGGCGCCT |
| | CH2-CH3 | CTGTGAAGCTGTCCTGCAAGGCTAGCGGCTACATCTTCACCTCCTACTA |
| | IgG1(N297Q) | TATGTATTGGGTGAAGCAGGCTCCTGGACAGGGACTGGAGTGGATCGGC |
| | (no terminal | GAGATCAACCCATCTAATGGCGACACCAACTTCAATGAGAAGTTTAAGT |
| | K) | CCAAGGCTACCCTGACAGTGGATAAGTCCGCCTCTACAGCCTACATGGA |
| | | GCTGTCCAGCCTGAGAAGCGAGGACACCGCCGTGTACTATTGCACAAGG |
| | | TCTGATGGCCGGAACGACATGGATTCCTGGGGCCAGGGCACCCTGGTGA |
| | | CAGTGTCTTCCGCTTCTACCAAGGGCCCTTCCGTGTTTCCACTGGCTCC |
| | | AAGCTCTAAGTCCACCAGCGGAGGAACAGCCGCTCTGGGCTGTCTGGTG |
| | | AAGGACTATTTCCCTGAGCCAGTGACAGTGAGCTGGAACTCTGGCGCTC |
| | | TGACCTCCGGCGTGCACACATTTCCAGCCGTGCTGCAGTCCAGCGGCCT |
| | | GTACAGCCTGTCTTCCGTGGTGACCGTGCCAAGCTCTTCCCTGGGCACC |
| | | CAGACATATATCTGCAACGTGAATCATAAGCCCTCTAATACAAAGGTGG |
| | | ACAAGAAGGTGGAGCCCAAGTCTTGTGATAAAACACATACTTGCCCCCC |
| | | TTGTCCTGCACCAGAACTGCTGGGAGGACCTAGCGTGTTCCTGTTTCCA |
| | | CCCAAGCCAAAAGACACCCTGATGATTAGTAGAACCCCTGAGGTCACAT |
| | | GCGTGGTCGTGGACGTGAGCCACGAGGACCCCGAGGTGAAGTTCAACTG |
| | | GTACGTGGACGGCGTGGAGGTGCACAATGCTAAGACCAAGCCCAGAGAG |
| | | GAGCAGTACCAGAGCACCTATCGCGTGGTGTCTGTGCTGACAGTGCTGC |
| | | ATCAGGATTGGCTGAACGGCAAGGAGTATAAGTGCAAGGTGAGCAATAA |
| | | GGCTCTGCCCGCCCCTATCGAGAAGACCATCTCTAAGGCTAAGGGCCAG |
| | | CCTAGGGAGCCACAGGTGTACACACTGCCCCCTTCCCGGGACGAGCTGA |
| | | CCAAGAACCAGGTGAGCCTGACATGTCTGGTGAAGGGCTTCTATCCCAG |
| | | CGATATCGCCGTGGAGTGGGAGTCTAATGGCCAGCCTGAGAACAATTAC |
| | | AAGACCACACCACCCGTGCTGGACTCCGATGGCAGCTTCTTTCTGTATT |
| | | CCAAGCTGACCGTGGATAAGAGCCGCTGGCAGCAGGGCAACGTGTTTTC |
| | | TTGTTCCGTGATGCACGAGGCCCTGCACAATCATTACACACAGAAGAGC |
| | | CTGTCTCTGTCCCCTGGC |
| 181 | TNX02 VH-CH1- | CAGGTGCAGCTGGTGCAGTCCGGAGCTGAGGTGGTGAAGCCAGGAGCCT |
| | CH2-CH3 IgG1 | CTGTGAAGCTGTCCTGCAAGGCTAGCGGCTACATCTTCACCAGCTACTA |
| | (wt) (no | TATGTATTGGGTGAAGCAGGCTCCAGGACAGGGCCTGGAGTGGATCGGC |
| | terminal K) | GAGATCAACCCTTCTAATGGCGACACCAACTTCAATGAGAAGTTTAAGT |
| | | CCAAGGCTACCCTGACAGTGGATAAGTCCGCCTCTACAGCCTACATGGA |
| | | GCTGTCCAGCCTGAGGTCTGAGGACACCGCCGTGTACTATTGCACAAGG |
| | | TCTGATGGCCGGAACGACATGGATTCCTGGGGCCAGGGCACCCTGGTGA |
| | | CAGTGTCTTCCGCTTCTACCAAGGGACCATCCGTGTTTCCACTGGCTCC |
| | | AAGCTCTAAGTCCACCAGCGGAGGAACAGCCGCTCTGGGCTGTCTGGTG |
| | | AAGGACTATTTCCCAGAGCCCGTGACAGTGAGCTGGAACTCTGGCGCTC |
| | | TGACCAGCGGCGTGCACACATTTCCAGCCGTGCTGCAGTCCAGCGGCCT |
| | | GTACTCTCTGTCTTCCGTGGTGACCGTGCCTAGCTCTTCCCTGGGCACC |
| | | CAGACATATATCTGCAACGTGAATCACAAGCCTAGCAATACAAAGGTGG |
| | | ACAAGAAGGTGGAGCCAAAGTCTTGTGATAAGACCCATACATGCCCCCC |
| | | TTGTCCTGCTCCAGAGCTGCTGGGAGGACCATCCGTGTTCCTGTTTCCA |
| | | CCCAAGCCCAAGGACACCCTGATGATCTCCAGAACCCCTGAGGTGACAT |
| | | GCGTGGTGGTGGACGTGAGCCACGAGGACCCCGAGGTGAAGTTCAACTG |
| | | GTACGTGGATGGCGTGGAGGTGCATAATGCCAAGACCAAGCCTAGAGAG |
| | | GAGCAGTACAATAGCACCTATCGCGTGGTGTCTGTGCTGACAGTGCTGC |
| | | ACCAGGACTGGCTGAACGGCAAGGAGTATAAGTGCAAGGTGTCTAATAA |
| | | GGCTCTGCCCGCCCCTATCGAGAAGACCATCTCCAAGGCTAAGGGCCAG |
| | | CCTAGGGAGCCACAGGTGTACACACTGCCTCCATCCCGGGACGAGCTGA |
| | | CCAAGAACCAGGTGAGCCTGACATGTCTGGTGAAGGGCTTCTATCCAAG |
| | | CGATATCGCCGTGGAGTGGGAGTCTAATGGCCAGCCCGAGAACAATTAC |
| | | AAGACCACACCCCCTGTGCTGGACTCCGATGGCAGCTTCTTTCTGTATT |
| | | CCAAGCTGACCGTGGATAAGAGCCGCTGGCAGCAGGGCAACGTGTTTTC |
| | | TTGTTCCGTGATGCATGAGGCTCTGCACAATCATTACACACAGAAGAGC |
| | | CTGTCTCTGTCCCCAGGC |
| 182 | TNX03 VH-CH1- | CAGGTGCAGCTGGTGCAGTCCGGAGCTGAGGTGGTGAAGCCAGGAGCCT |
| | CH2-CH3 | CTGTGAAGCTGTCCTGCAAGGCTAGCGGCTACATCTTCACCAGCTACTA |
| | IgG1 (N297G) | TATGTATTGGGTGAAGCAGGCTCCAGGACAGGGCCTGGAGTGGATCGGC |
| | (no terminal | GAGATCAACCCTTCTAATGGCGACACCAACTTCAATGAGAAGTTTAAGT |
| | K) | CCAAGGCTACCCTGACAGTGGATAAGTCCGCCTCTACAGCCTACATGGA |
| | | GCTGTCCAGCCTGAGGTCTGAGGACACCGCCGTGTACTATTGCACAAGG |
| | | TCTGATGGCCGGAACGACATGGATTCCTGGGGCCAGGGCACCCTGGTGA |
| | | CAGTGTCTTCCGCTTCTACCAAGGGACCATCCGTGTTTCCACTGGCTCC |
| | | AAGCTCTAAGTCCACCAGCGGAGGAACAGCCGCTCTGGGCTGTCTGGTG |
| | | AAGGACTATTTCCCAGAGCCCGTGACAGTGAGCTGGAACTCTGGCGCTC |
| | | TGACCAGCGGCGTGCACACATTTCCAGCCGTGCTGCAGTCCAGCGGCCT |
| | | GTACTCTCTGTCTTCCGTGGTGACCGTGCCTAGCTCTTCCCTGGGCACC |
| | | CAGACATATATCTGCAAGGTGAATCACAAGCCTAGCAATACAAAGGTGG |
| | | ACAAGAAGGTGGAGCCAAAGTCTTGTGATAAGACCCATACATGCCCCCC |
| | | TTGTCCTGCTCCAGAGCTGCTGGGAGGACCATCCGTGTTCCTGTTTCCA |
| | | CCCAAGCCCAAGGACACCCTGATGATCTCCAGAACCCCTGAGGTGACAT |
| | | GCGTGGTGGTGGACGTGAGCCACGAGGACCCCGAGGTGAAGTTCAACTG |
| | | GTACGTGGATGGCGTGGAGGTGCATAATGCCAAGACCAAGCCTAGAGAG |
| | | GAGCAGTACGGCAGCACCTATCGCGTGGTGTCTGTGCTGACAGTGCTGC |
| | | ACCAGGACTGGCTGAACGGCAAGGAGTATAAGTGCAAGGTGTCTAATAA |
| | | GGCTCTGCCCGCCCCTATCGAGAAGACCATCTCCAAGGCTAAGGGCCAG |
| | | CCTAGGGAGCCACAGGTGTACACACTGCCTCCATCCCGGGACGAGCTGA |
| | | CCAAGAACCAGGTGAGCCTGACATGTCTGGTGAAGGGCTTCTATCCAAG |
| | | CGATATCGCCGTGGAGTGGGAGTCTAATGGCCAGCCCGAGAACAATTAC |
| | | AAGACCACACCCCCTGTGCTGGACTCCGATGGCAGCTTCTTTCTGTATT |
| | | CCAAGCTGACCGTGGATAAGAGCCGCTGGCAGCAGGGCAACGTGTTTTC |
| | | TTGTTCCGTGATGCATGAGGCTCTGCACAATCATTACACACAGAAGAGC |
| | | CTGTCTCTGTCCCCAGGC |
| 183 | TNX04 VH-CH1- | CAGGTGCAGCTGGTGCAGAGCGGAGCTGAGGTGGTGAAGCCAGGAGCCT |
| | CH2-CH3 IgG1 | CTGTGAAGCTGTCCTGCAAGGCTAGCGGCTACATCTTCACCTCTTACTA |
| | (C220S, | TATGTATTGGGTGAAGCAGGCTCCAGGACAGGGCCTGGAGTGGATCGGC |
| | C226S, C229S, | GAGATCAACCCTTCTAATGGCGACACCAACTTCAATGAGAAGTTTAAGT |
| | P238S) (no | CCAAGGCTACCCTGACAGTGGATAAGTCTGCTTCCACAGCCTACATGGA |
| | terminal K) | GCTGTCCAGCCTGAGGTCCGAGGACACCGCCGTGTACTATTGCACAAGG |
| | | TCTGATGGCCGGAACGACATGGATTCCTGGGGCCAGGGCACCCTGGTGA |
| | | CAGTGTCTTCCGCTTCTACCAAGGGACCATCCGTGTTTCCACTGGCTCC |
| | | AAGCTCTAAGAGCACCTCTGGAGGAACAGCCGCTCTGGGATGTCTGGTG |
| | | AAGGACTATTTCCCAGAGCCCGTGACAGTGTCTTGGAACTCCGGCGCTC |
| | | TGACCTCTGGCGTGCACACATTTCCTGCCGTGCTGCAGTCCAGCGGCCT |
| | | GTACTCCCTGTCTTCCGTGGTGACCGTGCCAAGCTCTTCCCTGGGCACC |
| | | CAGACATATATCTGCAAGGTGAATCACAAGCCTTCCAATACAAAGGTGG |
| | | ACAAGAAGGTGGAGCCAAAGAGCTCTGATAAGACCCATACAAGCCCCCC |
| | | TTCTCCTGCTCCAGAGCTGCTGGGAGGCTCCAGCGTGTTCCTGTTTCCA |
| | | CCCAAGCCAAAGGACACCCTGATGATCAGCAGAACCCCCGAGGTGACAT |
| | | GCGTGGTGGTGGACGTGTCTCACGAGGACCCCGAGGTGAAGTTCAACTG |
| | | GTACGTGGATGGCGTGGAGGTGCATAATGCCAAGACCAAGCCTAGAGAG |
| | | GAGCAGTACAATAGCACCTATCGCGTGGTGTCTGTGCTGACAGTGCTGC |
| | | ACCAGGACTGGCTGAACGGCAAGGAGTATAAGTGCAAGGTGTCCAATAA |
| | | GGCTCTGCCCGCCCCTATCGAGAAGACCATCAGCAAGGCTAAGGGCCAG |
| | | CCTAGGGAGCCACAGGTGTACACACTGCCTCCATCCCGGGACGAGCTGA |
| | | CCAAGAACCAGGTGAGCCTGACATGTCTGGTGAAGGGCTTCTATCCAAG |
| | | CGATATCGCCGTGGAGTGGGAGTCTAATGGCCAGCCCGAGAACAATTAC |
| | | AAGACCACACCCCCTGTGCTGGACTCCGATGGCAGCTTCTTTCTGTATT |
| | | CCAAGCTGACCGTGGATAAGAGCCGCTGGCAGCAGGGCAACGTGTTTTC |
| | | CTGTAGCGTGATGCATGAGGCTCTGCACAATCATTACACACAGAAGTCT |
| | | CTGTCCCTGAGCCCTGGC |
| 184 | TNX05 VH-CH1- | CAGGTGCAGCTGGTGCAGTCTGGAGCTGAGGTGGTGAAGCCTGGAGCTA |
| | CH2-CH3 IgG4 | GCGTGAAGCTGTCTTGCAAGGCTTCCGGCTACATCTTCACCTCCTACTA |
| | (S228P, | TATGTATTGGGTGAAGCAGGCTCCTGGACAGGGCCTGGAGTGGATCGGC |
| | L235A) (no | GAGATCAACCCATCCAATGGCGACACAAACTTCAATGAGAAGTTTAAGA |
| | terminal K) | GCAAGGCTACCCTGACAGTGGATAAGTCCGCCTCTACCGCCTACATGGA |
| | | GCTGTCCAGCCTGAGGAGCGAGGACACAGCCGTGTACTATTGTACCAGG |
| | | AGCGATGGCCGGAACGACATGGATTCTTGGGGCCAGGGCACACTGGTGA |
| | | CCGTGTCTTCCGCTAGCACAAAGGGACCATCCGTGTTCCCACTGGCTCC |
| | | ATGCTCCAGGAGCACATCTGAGTCCACCGCCGCTCTGGGCTGTCTGGTG |
| | | AAGGACTATTTCCCTGAGCCAGTGACCGTGTCCTGGAATAGCGGCGCTC |
| | | TGACATCCGGAGTGCACACCTTTCCAGCCGTGCTGCAGAGCTCTGGCCT |
| | | GTACAGCCTGTCCAGCGTGGTGACAGTGCCTTCTTCCAGCCTGGGCACC |
| | | AAGACATATACCTGCAACGTGGACCATAAGCCATCTAATACCAAGGTGG |
| | | ATAAGAGAGTGGAGTCCAAGTACGGACCACCTTGCCCACCATGTCCAGC |
| | | TCCTGAGTTCGCTGGAGGACCATCCGTGTTCCTGTTTCCTCCAAAGCCC |
| | | AAGGACACCCTGATGATCTCTCGCACACCAGAGGTGACCTGCGTGGTGG |
| | | TGGACGTGTCCCAGGAGGACCCCGAGGTGCAGTTCAACTGGTACGTGGA |
| | | TGGCGTGGAGGTGCACAATGCTAAGACCAAGCCCAGGGAGGAGCAGTTT |
| | | AACTCCACATACCGGGTGGTGAGCGTGCTGACCGTGCTGCATCAGGATT |
| | | GGCTGAACGGCAAGGAGTATAAGTGCAAGGTGAGCAATAAGGGCCTGCC |
| | | TTCTTCCATCGAGAAGACAATCTCTAAGGCTAAGGGCCAGCCTCGGGAG |
| | | CCACAGGTGTACACCCTGCCCCCTAGCCAGGAGGAGATGACAAAGAACC |
| | | AGGTGTCTCTGACCTGTCTGGTGAAGGGCTTCTATCCCTCCGACATCGC |
| | | CGTGGAGTGGGAGAGCAATGGCCAGCCTGAGAACAATTACAAGACCACA |
| | | CCACCCGTGCTGGACTCTGATGGCTCCTTCTTTCTGTATTCTAGACTGA |
| | | CCGTCGATAAGTCCCGCTGGCAGGAGGGCAACGTGTTTAGCTGCTCTGT |
| | | GATGCACGAGGCCCTGCACAATCATTACACCCAGAAGTCCCTGAGCCTG |
| | | TCTCTGGGC |
| 298 | TNX06 VH-CH1- | CAGGTCCAGCTGGTCCAGTCAGGGGCTGAAGTGGTCAAACCCGGCGCCA |
| | CH2-CH3 IgG4 | GCGTGAAGCTGTCTTGCAAGGCTTCCGGCTACATCTTCACCAGCTACTA |
| | (wild type) | TATGTATTGGGTGAAGCAGGCTCCAGGACAGGGCCTGGAGTGGATCGGC |
| | (no terminal | GAGATCAACCCTTCCAATGGCGACACAAACTTCAATGAGAAGTTTAAGA |
| | K) | GCAAGGCCACCCTGACAGTGGATAAGAGCGCCTCTACCGCTTACATGGA |
| | | GCTGTCCAGCCTGAGGTCTGAGGACACAGCCGTGTACTATTGTACCAGG |
| | | AGCGATGGCCGGAACGACATGGATTCTTGGGGCCAGGGCACACTGGTGA |
| | | CCGTGTCTTCCGCCAGCACAAAGGGCCCTTCCGTGTTCCCCCTGGCTCC |
| | | TTGCTCCAGGAGCACATCTGAGTCCACCGCCGCTCTGGGCTGTCTGGTG |
| | | AAGGACTACTTCCCAGAGCCCGTGACCGTGTCCTGGAATAGCGGCGCCC |
| | | TGACATCCGGAGTGCACACCTTTCCAGCTGTGCTGCAGAGCTCTGGCCT |
| | | GTACAGCCTGTCCAGCGTGGTGACAGTGCCCTCTTCCAGCCTGGGCACC |
| | | AAGACATATACCTGCAACGTGGACCATAAGCCTTCTAATACCAAGGTGG |
| | | ATAAGAGAGTGGAGTCCAAGTACGGACCACCTTGCCCTAGCTGTCCTGC |
| | | TCCAGAGTTCCTGGGAGGACCTTCCGTGTTCCTGTTTCCACCCAAGCCA |
| | | AAGGACACACTGATGATCTCTCGCACACCTGAGGTGACCTGCGTGGTGG |
| | | TGGACGTGTCCCAGGAGGACCCCGAGGTGCAGTTCAACTGGTACGTGGA |
| | | TGGCGTGGAGGTGCACAATGCTAAGACCAAGCCAAGGGAGGAGCAGTTT |
| | | AACTCCACATACCGGGTGGTGAGCGTGCTGACCGTGCTGCATCAGGATT |
| | | GGCTGAACGGCAAGGAGTATAAGTGCAAGGTGAGCAATAAGGGCCTGCC |
| | | CTCTTCCATCGAGAAGACAATCTCTAAGGCTAAGGGACAGCCAAGGGAG |
| | | CCACAGGTGTACACCCTGCCTCCAAGCCAGGAGGAGATGACAAAGAACC |
| | | AGGTGTCTCTGACCTGTCTGGTGAAGGGCTTCTATCCATCTGACATCGC |
| | | TGTGGAGTGGGAGTCCAATGGCCAGCCCGAGAACAATTACAAGACCACA |
| | | CCCCCTGTGCTGGACTCTGATGGCTCCTTCTTTCTGTATTCTAGACTGA |
| | | CCGTGGATAAGTCCCGCTGGCAGGAGGGCAACGTGTTCTCCTGCTCTGT |
| | | GATGCACGAAGCACTGCACAATCATTACACTCAGAAGAGCCTGTCACTG |
| | | TCCCTGGGC |
| 299 | TNX07 VH-CH1- | CAGGTCCAGCTGGTCCAGTCAGGGGCTGAAGTGGTCAAACCCGGCGCCA |
| | CH2-CH3 IgG4 | GCGTGAAGCTGTCTTGCAAGGCTTCCGGCTACATCTTCACCAGCTACTA |
| | (S228P) (no | TATGTATTGGGTGAAGCAGGCTCCAGGACAGGGCCTGGAGTGGATCGGC |
| | terminal K) | GAGATCAACCCTTCCAATGGCGACACAAACTTCAATGAGAAGTTTAAGA |
| | | GCAAGGCCACCCTGACAGTGGATAAGAGCGCCTCTACCGCTTACATGGA |
| | | GCTGTCCAGCCTGAGGTCTGAGGACACAGCCGTGTACTATTGTACCAGG |
| | | AGCGATGGCCGGAACGACATGGATTCTTGGGGCCAGGGCACACTGGTGA |
| | | CCGTGTCTTCCGCCAGCACAAAGGGCCCTTCCGTGTTCCCCCTGGCTCC |
| | | TTGCTCCAGGAGCACATCTGAGTCCACCGCCGCTCTGGGCTGTCTGGTG |
| | | AAGGACTACTTCCCAGAGCCCGTGACCGTGTCCTGGAATAGCGGCGCCC |
| | | TGACATCCGGAGTGCACACCTTTCCAGCTGTGCTGCAGAGCTCTGGCCT |
| | | GTACAGCCTGTCCAGCGTGGTGACAGTGCCCTCTTCCAGCCTGGGCACC |
| | | AAGACATATACCTGCAACGTGGACCATAAGCCTTCTAATACCAAGGTGG |
| | | ATAAGAGAGTGGAGTCCAAGTACGGACCACCTTGCCCTCCCTGTCCTGC |
| | | TCCAGAGTTCCTGGGAGGACCTTCCGTGTTCCTGTTTCCACCCAAGCCA |
| | | AAGGACACACTGATGATCTCTCGCACACCTGAGGTGACCTGCGTGGTGG |
| | | TGGACGTGTCCCAGGAGGACCCCGAGGTGCAGTTCAACTGGTACGTGGA |
| | | TGGCGTGGAGGTGCACAATGCTAAGACCAAGCCAAGGGAGGAGCAGTTT |
| | | AACTCCACATACCGGGTGGTGAGCGTGCTGACCGTGCTGCATCAGGATT |
| | | GGCTGAACGGCAAGGAGTATAAGTGCAAGGTGAGCAATAAGGGCCTGCC |
| | | CTCTTCCATCGAGAAGACAATCTCTAAGGCTAAGGGACAGCCAAGGGAG |
| | | CCACAGGTGTACACCCTGCCTCCAAGCCAGGAGGAGATGACAAAGAACC |
| | | AGGTGTCTCTGACCTGTCTGGTGAAGGGCTTCTATCCATCTGACATCGC |
| | | TGTGGAGTGGGAGTCCAATGGCCAGCCCGAGAACAATTACAAGACCACA |
| | | CCCCCTGTGCTGGACTCTGATGGCTCCTTCTTTCTGTATTCTAGACTGA |
| | | CCGTGGATAAGTCCCGCTGGCAGGAGGGCAACGTGTTCTCCTGCTCTGT |
| | | GATGCACGAAGCACTGCACAATCATTACACTCAGAAGAGCCTGTCACTG |
| | | TCCCTGGGC |
| 300 | TNX08 VH-CH1- | CAGGTCCAGCTGGTCCAGTCAGGGGCTGAAGTGGTCAAACCCGGCGCCA |
| | CH2-CH3 (IgG4 | GCGTGAAGCTGTCTTGCAAGGCTTCCGGCTACATCTTCACCAGCTACTA |
| | S228P/L235E) | TATGTATTGGGTGAAGCAGGCTCCAGGACAGGGCCTGGAGTGGATCGGC |
| | (no terminal | GAGATCAACCCTTCCAATGGCGACACAAACTTCAATGAGAAGTTTAAGA |
| | K) | GCAAGGCCACCCTGACAGTGGATAAGAGCGCCTCTACCGCTTACATGGA |
| | | GCTGTCCAGCCTGAGGTCTGAGGACACAGCCGTGTACTATTGTACCAGG |
| | | AGCGATGGCCGGAACGACATGGATTCTTGGGGCCAGGGCACACTGGTGA |
| | | CCGTGTCTTCCGCCAGCACAAAGGGCCCTTCCGTGTTCCCCCTGGCTCC |
| | | TTGCTCCAGGAGCACATCTGAGTCCACCGCCGCTCTGGGCTGTCTGGTG |
| | | AAGGACTACTTCCCAGAGCCCGTGACCGTGTCCTGGAATAGCGGCGCCC |
| | | TGACATCCGGAGTGCACACCTTTCCAGCTGTGCTGCAGAGCTCTGGCCT |
| | | GTACAGCCTGTCCAGCGTGGTGACAGTGCCCTCTTCCAGCCTGGGCACC |
| | | AAGACATATACCTGCAACGTGGACCATAAGCCTTCTAATACCAAGGTGG |
| | | ATAAGAGAGTGGAGTCCAAGTACGGACCACCTTGCCCTCCCTGTCCTGC |
| | | TCCAGAGTTCGAGGGAGGACCTTCCGTGTTCCTGTTTCCACCCAAGCCA |
| | | AAGGACACACTGATGATCTCTCGCACACCTGAGGTGACCTGCGTGGTGG |
| | | TGGACGTGTCCCAGGAGGACCCCGAGGTGCAGTTCAACTGGTACGTGGA |
| | | TGGCGTGGAGGTGCACAATGCTAAGACCAAGCCAAGGGAGGAGCAGTTT |
| | | AACTCCACATACCGGGTGGTGAGCGTGCTGACCGTGCTGCATCAGGATT |
| | | GGCTGAACGGCAAGGAGTATAAGTGCAAGGTGAGCAATAAGGGCCTGCC |
| | | CTCTTCCATCGAGAAGACAATCTCTAAGGCTAAGGGACAGCCAAGGGAG |
| | | CCACAGGTGTACACCCTGCCTCCAAGCCAGGAGGAGATGACAAAGAACC |
| | | AGGTGTCTCTGACCTGTCTGGTGAAGGGCTTCTATCCATCTGACATCGC |
| | | TGTGGAGTGGGAGTCCAATGGCCAGCCCGAGAACAATTACAAGACCACA |
| | | CCCCCTGTGCTGGACTCTGATGGCTCCTTCTTTCTGTATTCTAGACTGA |
| | | CCGTGGATAAGTCCCGCTGGCAGGAGGGCAACGTGTTCTCCTGCTCTGT |
| | | GATGCACGAAGCACTGCACAATCATTACACTCAGAAGAGCCTGTCACTG |
| | | TCCCTGGGC |
| 301 | TNX09 VH-CH1- | CAGGTCCAGCTGGTCCAGTCAGGGGCTGAAGTGGTCAAACCCGGCGCCA |
| | CH2-CH3 IgG4 | GCGTGAAGCTGTCTTGCAAGGCTTCCGGCTACATCTTCACCAGCTACTA |
| | (S228P/F234A/ | TATGTATTGGGTGAAGCAGGCTCCAGGACAGGGCCTGGAGTGGATCGGC |
| | L235A) (no | GAGATCAACCCTTCCAATGGCGACACAAACTTCAATGAGAAGTTTAAGA |
| | terminal K) | GCAAGGCCACCCTGACAGTGGATAAGAGCGCCTCTACCGCTTACATGGA |
| | | GCTGTCCAGCCTGAGGTCTGAGGACACAGCCGTGTACTATTGTACCAGG |
| | | AGCGATGGCCGGAACGACATGGATTCTTGGGGCCAGGGCACACTGGTGA |
| | | CCGTGTCTTCCGCCAGCACAAAGGGCCCTTCCGTGTTCCCCCTGGCTCC |
| | | TTGCTCCAGGAGCACATCTGAGTCCACCGCCGCTCTGGGCTGTCTGGTG |
| | | AAGGACTACTTCCCAGAGCCCGTGACCGTGTCCTGGAATAGCGGCGCCC |
| | | TGACATCCGGAGTGCACACCTTTCCAGCTGTGCTGCAGAGCTCTGGCCT |
| | | GTACAGCCTGTCCAGCGTGGTGACAGTGCCCTCTTCCAGCCTGGGCACC |
| | | AAGACATATACCTGCAACGTGGACCATAAGCCTTCTAATACCAAGGTGG |
| | | ATAAGAGAGTGGAGTCCAAGTACGGACCACCTTGCCCTCCCTGTCCTGC |
| | | TCCAGAGGCCGCCGGAGGACCTTCCGTGTTCCTGTTTCCACCCAAGCCA |
| | | AAGGACACACTGATGATCTCTCGCACACCTGAGGTGACCTGCGTGGTGG |
| | | TGGACGTGTCCCAGGAGGACCCCGAGGTGCAGTTCAACTGGTACGTGGA |
| | | TGGCGTGGAGGTGCACAATGCTAAGACCAAGCCAAGGGAGGAGCAGTTT |
| | | AACTCCACATACCGGGTGGTGAGCGTGCTGACCGTGCTGCATCAGGATT |
| | | GGCTGAACGGCAAGGAGTATAAGTGCAAGGTGAGCAATAAGGGCCTGCC |
| | | CTCTTCCATCGAGAAGACAATCTCTAAGGCTAAGGGACAGCCAAGGGAG |
| | | CCACAGGTGTACACCCTGCCTCCAAGCCAGGAGGAGATGACAAAGAACC |
| | | AGGTGTCTCTGACCTGTCTGGTGAAGGGCTTCTATCCATCTGACATCGC |
| | | TGTGGAGTGGGAGTCCAATGGCCAGCCCGAGAACAATTACAAGACCACA |
| | | CCCCCTGTGCTGGACTCTGATGGCTCCTTCTTTCTGTATTCTAGACTGA |
| | | CCGTGGATAAGTCCCGCTGGCAGGAGGGCAACGTGTTCTCCTGCTCTGT |
| | | GATGCACGAAGCACTGCACAATCATTACACTCAGAAGAGCCTGTCACTG |
| | | TCCCTGGGC |
| 302 | TNX10 VH-CH1- | CAGGTCCAGCTGGTCCAGTCAGGTGCCGAAGTGGTCAAGCCCGGCGCCT |
| | CH2-CH3 IgG1 | CTGTGAAGCTGTCCTGCAAGGCTAGCGGCTACATCTTCACCTCCTACTA |
| | (L234A/L235A) | TATGTATTGGGTGAAGCAGGCTCCTGGACAGGGCCTGGAGTGGATCGGC |
| | (no terminal | GAGATCAACCCATCTAATGGCGACACCAACTTCAATGAGAAGTTTAAGT |
| | K) | CCAAGGCCACCCTGACAGTGGATAAGAGCGCCTCTACAGCTTACATGGA |
| | | GCTGTCCAGCCTGAGGAGCGAGGACACCGCCGTGTACTATTGCACAAGG |
| | | TCTGATGGCCGGAACGACATGGATTCCTGGGGCCAGGGCACCCTGGTGA |
| | | CAGTGTCTTCCGCCTCTACCAAGGGCCCTTCCGTGTTTCCACTGGCTCC |
| | | CAGCTCTAAGTCCACCAGCGGAGGAACAGCCGCTCTGGGCTGTCTGGTG |
| | | AAGGACTACTTCCCAGAGCCCGTGACAGTGAGCTGGAACTCTGGCGCCC |
| | | TGACCAGCGGAGTGCACACATTTCCTGCTGTGCTGCAGTCCAGCGGCCT |
| | | GTACTCTCTGTCTTCCGTGGTGACCGTGCCAAGCTCTTCCCTGGGCACC |
| | | CAGACATATATCTGCAACGTGAATCACAAGCCAAGCAATACAAAGGTGG |
| | | ACAAGAAGGTGGAGCCCAAGTCTTGTGATAAGACCCATACATGCCCCCC |
| | | TTGTCCTGCTCCAGAGGCTGCTGGAGGACCATCCGTGTTCCTGTTTCCA |
| | | CCCAAGCCTAAGGACACCCTGATGATCTCCAGAACCCCAGAGGTGACAT |
| | | GCGTGGTGGTGGACGTGAGCCACGAGGACCCCGAGGTGAAGTTCAACTG |
| | | GTACGTGGATGGCGTGGAGGTGCATAATGCTAAGACCAAGCCAAGAGAG |
| | | GAGCAGTACAACAGCACCTATCGCGTGGTGTCTGTGCTGACAGTGCTGC |
| | | ATCAGGACTGGCTGAACGGCAAGGAGTATAAGTGCAAGGTGTCTAATAA |
| | | GGCCCTGCCCGCTCCTATCGAGAAGACCATCTCCAAGGCCAAGGGCCAG |
| | | CCTAGGGAGCCACAGGTGTACACACTGCCTCCATCCCGGGACGAGCTGA |
| | | CCAAGAACCAGGTGAGCCTGACATGTCTGGTGAAGGGCTTCTATCCCAG |
| | | CGATATCGCTGTGGAGTGGGAGTCTAATGGCCAGCCTGAGAACAATTAC |
| | | AAGACCACACCCCCTGTGCTGGACTCCGATGGCAGCTTCTTTCTGTATT |
| | | CCAAGCTGACCGTGGATAAGAGCCGCTGGCAGCAGGGCAACGTGTTCTC |
| | | CTGTTCCGTCATGCACGAGGCACTGCACAATCATTACACCCAGAAGTCA |
| | | CTGTCACTGTCACCAGGA |
| 303 | TNX11 VH-CH1- | CAGGTCCAGCTGGTCCAGTCAGGTGCCGAAGTGGTCAAGCCCGGCGCCT |
| | CH2-CH3 IgG1 | CTGTGAAGCTGTCCTGCAAGGCTAGCGGCTACATCTTCACCTCCTACTA |
| | (C226S, | TATGTATTGGGTGAAGCAGGCTCCTGGACAGGGCCTGGAGTGGATCGGC |
| | C229S, P238S) | GAGATCAACCCATCTAATGGCGACACCAACTTCAATGAGAAGTTTAAGT |
| | (no terminal | CCAAGGCCACCCTGACAGTGGATAAGAGCGCCTCTACAGCTTACATGGA |
| | K) | GCTGTCCAGCCTGAGGAGCGAGGACACCGCCGTGTACTATTGCACAAGG |
| | | TCTGATGGCCGGAACGACATGGATTCCTGGGGCCAGGGCACCCTGGTGA |
| | | CAGTGTCTTCCGCCTCTACCAAGGGCCCTTCCGTGTTTCCACTGGCTCC |
| | | CAGCTCTAAGTCCACCAGCGGAGGAACAGCCGCTCTGGGCTGTCTGGTG |
| | | AAGGACTACTTCCCAGAGCCCGTGACAGTGAGCTGGAACTCTGGCGCCC |
| | | TGACCAGCGGAGTGCACACATTTCCTGCTGTGCTGCAGTCCAGCGGCCT |
| | | GTACTCTCTGTCTTCCGTGGTGACCGTGCCAAGCTCTTCCCTGGGCACC |
| | | CAGACATATATCTGCAACGTGAATCACAAGCCAAGCAATACAAAGGTGG |
| | | ACAAGAAGGTGGAGCCCAAGTCTTGTGATAAGACCCATACAtccCCCCC |
| | | TTccCCTGCTCCAGAGCTGCTGGGAGGAAGCTCCGTGTTCCTGTTTCCA |
| | | CCCAAGCCTAAGGACACCCTGATGATCTCCAGAACCCCAGAGGTGACAT |
| | | GCGTGGTGGTGGACGTGAGCCACGAGGACCCCGAGGTGAAGTTCAACTG |
| | | GTACGTGGATGGCGTGGAGGTGCATAATGCTAAGACCAAGCCAAGAGAG |
| | | GAGCAGTACAACAGCACCTATCGCGTGGTGTCTGTGCTGACAGTGCTGC |
| | | ATCAGGACTGGCTGAACGGCAAGGAGTATAAGTGCAAGGTGTCTAATAA |
| | | GGCCCTGCCCGCTCCTATCGAGAAGACCATCTCCAAGGCCAAGGGCCAG |
| | | CCTAGGGAGCCACAGGTGTACACACTGCCTCCATCCCGGGACGAGCTGA |
| | | CCAAGAACCAGGTGAGCCTGACATGTCTGGTGAAGGGCTTCTATCCCAG |
| | | CGATATCGCTGTGGAGTGGGAGTCTAATGGCCAGCCTGAGAACAATTAC |
| | | AAGACCACACCCCCTGTGCTGGACTCCGATGGCAGCTTCTTTCTGTATT |
| | | CCAAGCTGACCGTGGATAAGAGCCGCTGGCAGCAGGGCAACGTGTTCTC |
| | | CTGTTCCGTCATGCACGAGGCACTGCACAATCATTACACCCAGAAGTCA |
| | | CTGTCACTGTCACCAGGA |
| 304 | TNX12 VH-CH1- | CAGGTCCAGCTGGTCCAGTCAGGTGCCGAAGTGGTCAAGCCCGGCGCCT |
| | CH2-CH3 IgG1 | CTGTGAAGCTGTCCTGCAAGGCTAGCGGCTACATCTTCACCTCCTACTA |
| | (C229S, | TATGTATTGGGTGAAGCAGGCTCCTGGACAGGGCCTGGAGTGGATCGGC |
| | P238S) (no | GAGATCAACCCATCTAATGGCGACACCAACTTCAATGAGAAGTTTAAGT |
| | terminal K) | CCAAGGCCACCCTGACAGTGGATAAGAGCGCCTCTACAGCTTACATGGA |
| | | GCTGTCCAGCCTGAGGAGCGAGGACACCGCCGTGTACTATTGCACAAGG |
| | | TCTGATGGCCGGAACGACATGGATTCCTGGGGCCAGGGCACCCTGGTGA |
| | | CAGTGTCTTCCGCCTCTACCAAGGGCCCTTCCGTGTTTCCACTGGCTCC |
| | | CAGCTCTAAGTCCACCAGCGGAGGAACAGCCGCTCTGGGCTGTCTGGTG |
| | | AAGGACTACTTCCCAGAGCCCGTGACAGTGAGCTGGAACTCTGGCGCCC |
| | | TGACCAGCGGAGTGCACACATTTCCTGCTGTGCTGCAGTCCAGCGGCCT |
| | | GTACTCTCTGTCTTCCGTGGTGACCGTGCCAAGCTCTTCCCTGGGCACC |
| | | CAGACATATATCTGCAACGTGAATCACAAGCCAAGCAATACAAAGGTGG |
| | | ACAAGAAGGTGGAGCCCAAGTCTTGTGATAAGACCCATACATGCCCCCC |
| | | TTCCCCTGCTCCAGAGCTGCTGGGAGGAAGcTCCGTGTTCCTGTTTCCA |
| | | CCCAAGCCTAAGGACACCCTGATGATCTCCAGAACCCCAGAGGTGACAT |
| | | GCGTGGTGGTGGACGTGAGCCACGAGGACCCCGAGGTGAAGTTCAACTG |
| | | GTACGTGGATGGCGTGGAGGTGCATAATGCTAAGACCAAGCCAAGAGAG |
| | | GAGCAGTACAACAGCACCTATCGCGTGGTGTCTGTGCTGACAGTGCTGC |
| | | ATCAGGACTGGCTGAACGGCAAGGAGTATAAGTGCAAGGTGTCTAATAA |
| | | GGCCCTGCCCGCTCCTATCGAGAAGACCATCTCCAAGGCCAAGGGCCAG |
| | | CCTAGGGAGCCACAGGTGTACACACTGCCTCCATCCCGGGACGAGCTGA |
| | | CCAAGAACCAGGTGAGCCTGACATGTCTGGTGAAGGGCTTCTATCCCAG |
| | | CGATATCGCTGTGGAGTGGGAGTCTAATGGCCAGCCTGAGAACAATTAC |
| | | AAGACCACACCCCCTGTGCTGGACTCCGATGGCAGCTTCTTTCTGTATT |
| | | CCAAGCTGACCGTGGATAAGAGCCGCTGGCAGCAGGGCAACGTGTTCTC |
| | | CTGTTCCGTCATGCACGAGGCACTGCACAATCATTACACCCAGAAGTCA |
| | | CTGTCACTGTCACCAGGA |
| 305 | TNX13 VH-CH1- | CAGGTCCAGCTGGTCCAGTCAGGTGCCGAAGTGGTCAAGCCCGGCGCCT |
| | CH2-CH3 IgG1 | CTGTGAAGCTGTCCTGCAAGGCTAGCGGCTACATCTTCACCTCCTACTA |
| | (C226S, | TATGTATTGGGTGAAGCAGGCTCCTGGACAGGGCCTGGAGTGGATCGGC |
| | P238S) (no | GAGATCAACCCATCTAATGGCGACACCAACTTCAATGAGAAGTTTAAGT |
| | terminal K) | CCAAGGCCACCCTGACAGTGGATAAGAGCGCCTCTACAGCTTACATGGA |
| | | GCTGTCCAGCCTGAGGAGCGAGGACACCGCCGTGTACTATTGCACAAGG |
| | | TCTGATGGCCGGAACGACATGGATTCCTGGGGCCAGGGCACCCTGGTGA |
| | | CAGTGTCTTCCGCCTCTACCAAGGGCCCTTCCGTGTTTCCACTGGCTCC |
| | | CAGCTCTAAGTCCACCAGCGGAGGAACAGCCGCTCTGGGCTGTCTGGTG |
| | | AAGGACTACTTCCCAGAGCCCGTGACAGTGAGCTGGAACTCTGGCGCCC |
| | | TGACCAGCGGAGTGCACACATTTCCTGCTGTGCTGCAGTCCAGCGGCCT |
| | | GTACTCTCTGTCTTCCGTGGTGACCGTGCCAAGCTCTTCCCTGGGCACC |
| | | CAGACATATATCTGCAACGTGAATCACAAGCCAAGCAATACAAAGGTGG |
| | | ACAAGAAGGTGGAGCCCAAGTCTTGTGATAAGACCCATACATCCCCCCC |
| | | TTGCCCTGCTCCAGAGCTGCTGGGAGGAAGCTCCGTGTTCCTGTTTCCA |
| | | CCCAAGCCTAAGGACACCCTGATGATCTCCAGAACCCCAGAGGTGACAT |
| | | GCGTGGTGGTGGACGTGAGCCACGAGGACCCCGAGGTGAAGTTCAACTG |
| | | GTACGTGGATGGCGTGGAGGTGCATAATGCTAAGACCAAGCCAAGAGAG |
| | | GAGCAGTACAACAGCACCTATCGCGTGGTGTCTGTGCTGACAGTGCTGC |
| | | ATCAGGACTGGCTGAACGGCAAGGAGTATAAGTGCAAGGTGTCTAATAA |
| | | GGCCCTGCCCGCTCCTATCGAGAAGACCATCTCCAAGGCCAAGGGCCAG |
| | | CCTAGGGAGCCACAGGTGTACACACTGCCTCCATCCCGGGACGAGCTGA |
| | | CCAAGAACCAGGTGAGCCTGACATGTCTGGTGAAGGGCTTCTATCCCAG |
| | | CGATATCGCTGTGGAGTGGGAGTCTAATGGCCAGCCTGAGAACAATTAC |
| | | AAGACCACACCCCCTGTGCTGGACTCCGATGGCAGCTTCTTTCTGTATT |
| | | CCAAGCTGACCGTGGATAAGAGCCGCTGGCAGCAGGGCAACGTGTTCTC |
| | | CTGTTCCGTCATGCACGAGGCACTGCACAATCATTACACCCAGAAGTCA |
| | | CTGTCACTGTCACCAGGA |
| 306 | TNX14 VH-CH1- | CAGGTCCAGCTGGTCCAGTCAGGGGCTGAAGTGGTCAAAC |
| | CH2-CH3 IgG4 | CCGGCGCCAGCGTGAAGCTGTCTTGCAAGGCTTCCGGCTA |
| | (L115T, | CATCTTCACCAGCTACTATATGTATTGGGTGAAGCAGGCT |
| | S228P, L235A) | CCAGGACAGGGCCTGGAGTGGATCGGCGAGATCAACCCTT |
| | (no terminal | CCAATGGCGACACAAACTTCAATGAGAAGTTTAAGAGCAA |
| | K) | GGCCACCCTGACAGTGGATAAGAGCGCCTCTACCGCTTAC |
| | | ATGGAGCTGTCCAGCCTGAGGTCTGAGGACACAGCCGTGT |
| | | ACTATTGTACCAGGAGCGATGGCCGGAACGACATGGATTC |
| | | TTGGGGCCAGGGCACAACAGTGACCGTGTCTTCCGCCAGC |
| | | ACAAAGGGCCCTTCCGTGTTCCCCCTGGCTCCTTGCTCCA |
| | | GGAGCACATCTGAGTCCACCGCCGCTCTGGGCTGTCTGGT |
| | | GAAGGACTACTTCCCAGAGCCCGTGACCGTGTCCTGGAAT |
| | | AGCGGCGCCCTGACATCCGGAGTGCACACCTTTCCAGCTG |
| | | TGCTGCAGAGCTCTGGCCTGTACAGCCTGTCCAGCGTGGT |
| | | GACAGTGCCCTCTTCCAGCCTGGGCACCAAGACATATACC |
| | | TGCAACGTGGACCATAAGCCTTCTAATACCAAGGTGGATA |
| | | AGAGAGTGGAGTCCAAGTACGGACCACCTTGCCCTCCTTG |
| | | TCCTGCTCCAGAGTTCGCCGGAGGACCTTCCGTGTTCCTG |
| | | TTTCCACCCAAGCCAAAGGACACACTGATGATCTCTCGCA |
| | | CACCTGAGGTGACCTGCGTGGTGGTGGACGTGTCCCAGGA |
| | | GGACCCCGAGGTGCAGTTCAACTGGTACGTGGATGGCGTG |
| | | GAGGTGCACAATGCTAAGACCAAGCCAAGGGAGGAGCAGT |
| | | TTAACTCCACATACCGGGTGGTGAGCGTGCTGACCGTGCT |
| | | GCATCAGGATTGGCTGAACGGCAAGGAGTATAAGTGCAAG |
| | | GTGAGCAATAAGGGCCTGCCCTCTTCCATCGAGAAGACAA |
| | | TCTCTAAGGCTAAGGGACAGCCAAGGGAGCCACAGGTGTA |
| | | CACCCTGCCTCCAAGCCAGGAGGAGATGACAAAGAACCAG |
| | | GTGTCTCTGACCTGTCTGGTGAAGGGCTTCTATCCATCTG |
| | | ACATCGCTGTGGAGTGGGAGTCCAATGGCCAGCCCGAGAA |
| | | CAATTACAAGACCACACCCCCTGTGCTGGACTCTGATGGC |
| | | TCCTTCTTTCTGTATTCTAGACTGACCGTGGATAAGTCCC |
| | | GCTGGCAGGAGGGCAACGTGTTCTCCTGCTCTGTGATGCA |
| | | CGAAGCACTGCACAATCATTAGACTCAGAAGAGCCTGTCA |
| | | CTGTCCCTGGGC |

Heavy chain DNA sequences WITHOUT LEADER; with terminal K

| | | |
|---|---|---|
| 185 | TNX01 VH-CH1- | CAGGTGCAGCTGGTGCAGTCTGGAGCTGAGGTGGTGAAGCCAGGCGCCT |
| | CH2-CH3 | CTGTGAAGCTGTCCTGCAAGGCTAGCGGCTACATCTTCACCTCCTACTA |
| | IgG1 (N297Q) | TATGTATTGGGTGAAGCAGGCTCCTGGACAGGGACTGGAGTGGATCGGC |
| | (with | GAGATCAACCCATCTAATGGCGACACCAACTTCAATGAGAAGTTTAAGT |
| | terminal K) | CCAAGGCTACCCTGACAGTGGATAAGTCCGCCTCTACAGCCTACATGGA |
| | | GCTGTCCAGCCTGAGAAGCGAGGACACCGCCGTGTACTATTGCACAAGG |
| | | TCTGATGGCCGGAACGACATGGATTCCTGGGGCCAGGGCACCCTGGTGA |
| | | CAGTGTCTTCCGCTTCTACCAAGGGCCCTTCCGTGTTTCCACTGGCTCC |
| | | AAGCTCTAAGTCCACCAGCGGAGGAACAGCCGCTCTGGGCTGTCTGGTG |
| | | AAGGACTATTTCCCTGAGCCAGTGACAGTGAGCTGGAACTCTGGCGCTC |
| | | TGACCTCCGGCGTGCACACATTTCCAGCCGTGCTGCAGTCCAGCGGCCT |
| | | GTACAGCCTGTCTTCCGTGGTGACCGTGCCAAGCTCTTCCCTGGGCACC |
| | | CAGACATATATCTGCAACGTGAATCATAAGCCCTCTAATACAAAGGTGG |
| | | ACAAGAAGGTGGAGCCCAAGTCTTGTGATAAAACACATACTTGCCCCCC |
| | | TTGTCCTGCACCAGAACTGCTGGGAGGACCTAGCGTGTTCCTGTTTCCA |
| | | CCCAAGCCAAAAGACACCCTGATGATTAGTAGAACCCCTGAGGTCACAT |
| | | GCGTGGTCGTGGACGTGAGCCACGAGGACCCCGAGGTGAAGTTCAACTG |
| | | GTACGTGGACGGCGTGGAGGTGCACAATGCTAAGACCAAGCCCAGAGAG |
| | | GAGCAGTACCAGAGCACCTATCGCGTGGTGTCTGTGCTGACAGTGCTGC |
| | | ATCAGGATTGGCTGAACGGCAAGGAGTATAAGTGCAAGGTGAGCAATAA |
| | | GGCTCTGCCCGCCCCTATCGAGAAGACCATCTCTAAGGCTAAGGGCCAG |
| | | CCTAGGGAGCCACAGGTGTACACACTGCCCCCTTCCCGGGACGAGCTGA |
| | | CCAAGAACCAGGTGAGCCTGACATGTCTGGTGAAGGGCTTCTATCCCAG |
| | | CGATATCGCCGTGGAGTGGGAGTCTAATGGCCAGCCTGAGAACAATTAC |
| | | AAGACCACACCACCCGTGCTGGACTCCGATGGCAGCTTCTTTCTGTATT |
| | | CCAAGCTGACCGTGGATAAGAGCCGCTGGCAGCAGGGCAACGTGTTTTC |
| | | TTGTTCCGTGATGCACGAGGCCCTGCACAATCATTACACACAGAAGAGC |
| | | CTGTCTCTGTCCCCTGGCAAG |
| 186 | TNX02 VH-CH1- | CAGGTGCAGCTGGTGCAGTCCGGAGCTGAGGTGGTGAAGCCAGGAGCCT |
| | CH2-CH3 IgG1 | CTGTGAAGCTGTCCTGCAAGGCTAGCGGCTACATCTTCACCAGCTACTA |
| | (wt) (with | TATGTATTGGGTGAAGCAGGCTCCAGGACAGGGCCTGGAGTGGATCGGC |
| | terminal K) | GAGATCAACCCTTCTAATGGCGACACCAACTTCAATGAGAAGTTTAAGT |
| | | CCAAGGCTACCCTGACAGTGGATAAGTCCGCCTCTACAGCCTACATGGA |
| | | GCTGTCCAGCCTGAGGTCTGAGGACACCGCCGTGTACTATTGCACAAGG |
| | | TCTGATGGCCGGAACGACATGGATTCCTGGGGCCAGGGCACCCTGGTGA |
| | | CAGTGTCTTCCGCTTCTACCAAGGGACCATCCGTGTTTCCACTGGCTCC |
| | | AAGCTCTAAGTCCACCAGCGGAGGAACAGCCGCTCTGGGCTGTCTGGTG |
| | | AAGGACTATTTCCCAGAGCCCGTGACAGTGAGCTGGAACTCTGGCGCTC |
| | | TGACCAGCGGCGTGCACACATTTCCAGCCGTGCTGCAGTCCAGCGGCCT |
| | | GTACTCTCTGTCTTCCGTGGTGACCGTGCCTAGCTCTTCCCTGGGCACC |
| | | CAGACATATATCTGCAACGTGAATCACAAGCCTAGCAATACAAAGGTGG |
| | | ACAAGAAGGTGGAGCCAAAGTCTTGTGATAAGACCCATACATGCCCCCC |
| | | TTGTCCTGCTCCAGAGCTGCTGGGAGGACCATCCGTGTTCCTGTTTCCA |
| | | CCCAAGCCCAAGGACACCCTGATGATCTCCAGAACCCCTGAGGTGACAT |
| | | GCGTGGTGGTGGACGTGAGCCACGAGGACCCCGAGGTGAAGTTCAACTG |
| | | GTACGTGGATGGCGTGGAGGTGCATAATGCCAAGACCAAGCCTAGAGAG |
| | | GAGCAGTACAATAGCACCTATCGCGTGGTGTCTGTGCTGACAGTGCTGC |
| | | ACCAGGACTGGCTGAACGGCAAGGAGTATAAGTGCAAGGTGTCTAATAA |
| | | GGCTCTGCCCGCCCCTATCGAGAAGACCATCTCCAAGGCTAAGGGCCAG |
| | | CCTAGGGAGCCACAGGTGTACACACTGCCTCCATCCCGGGACGAGCTGA |
| | | CCAAGAACCAGGTGAGCCTGACATGTCTGGTGAAGGGCTTCTATCCAAG |
| | | CGATATCGCCGTGGAGTGGGAGTCTAATGGCCAGCCCGAGAACAATTAC |
| | | AAGACCACACCCCCTGTGCTGGACTCCGATGGCAGCTTCTTTCTGTATT |
| | | CCAAGCTGACCGTGGATAAGAGCCGCTGGCAGCAGGGCAACGTGTTTTC |
| | | TTGTTCCGTGATGCATGAGGCTCTGCACAATCATTACACACAGAAGAGC |
| | | CTGTCTCTGTCCCCAGGCAAG |
| 187 | TNX03 VH-CH1- | CAGGTGCAGCTGGTGCAGTCCGGAGCTGAGGTGGTGAAGCCAGGAGCCT |
| | CH2-CH3 | CTGTGAAGCTGTCCTGCAAGGCTAGCGGCTACATCTTCACCAGCTACTA |
| | IgG1(N297G) | TATGTATTGGGTGAAGCAGGCTCCAGGACAGGGCCTGGAGTGGATCGGC |
| | (with | GAGATCAACCCTTCTAATGGCGACACCAACTTCAATGAGAAGTTTAAGT |
| | terminal K) | CCAAGGCTACCCTGACAGTGGATAAGTCCGCCTCTACAGCCTACATGGA |
| | | GCTGTCCAGCCTGAGGTCTGAGGACACCGCCGTGTACTATTGCACAAGG |
| | | TCTGATGGCCGGAACGACATGGATTCCTGGGGCCAGGGCACCCTGGTGA |
| | | CAGTGTCTTCCGCTTCTACCAAGGGACCATCCGTGTTTCCACTGGCTCC |
| | | AAGCTCTAAGTCCACCAGCGGAGGAACAGCCGCTCTGGGCTGTCTGGTG |
| | | AAGGACTATTTCCCAGAGCCCGTGACAGTGAGCTGGAACTCTGGCGCTC |
| | | TGACCAGCGGCGTGCACACATTTCCAGCCGTGCTGCAGTCCAGCGGCCT |
| | | GTACTCTCTGTCTTCCGTGGTGACCGTGCCTAGCTCTTCCCTGGGCACC |
| | | CAGACATATATCTGCAAGGTGAATCACAAGCCTAGCAATACAAAGGTGG |
| | | ACAAGAAGGTGGAGCCAAAGTCTTGTGATAAGACCCATACATGCCCCCC |
| | | TTGTCCTGCTCCAGAGCTGCTGGGAGGACCATCCGTGTTCCTGTTTCCA |
| | | CCCAAGCCCAAGGACACCCTGATGATCTCCAGAACCCCTGAGGTGACAT |
| | | GCGTGGTGGTGGACGTGAGCCACGAGGACCCCGAGGTGAAGTTCAACTG |
| | | GTACGTGGATGGCGTGGAGGTGCATAATGCCAAGACCAAGCCTAGAGAG |
| | | GAGCAGTACGGCAGCACCTATCGCGTGGTGTCTGTGCTGACAGTGCTGC |
| | | ACCAGGACTGGCTGAACGGCAAGGAGTATAAGTGCAAGGTGTCTAATAA |
| | | GGCTCTGCCCGCCCCTATCGAGAAGACCATCTCCAAGGCTAAGGGCCAG |
| | | CCTAGGGAGCCACAGGTGTACACACTGCCTCCATCCCGGGACGAGCTGA |
| | | CCAAGAACCAGGTGAGCCTGACATGTCTGGTGAAGGGCTTCTATCCAAG |
| | | CGATATCGCCGTGGAGTGGGAGTCTAATGGCCAGCCCGAGAACAATTAC |
| | | AAGACCACACCCCCTGTGCTGGACTCCGATGGCAGCTTCTTTCTGTATT |
| | | CCAAGCTGACCGTGGATAAGAGCCGCTGGCAGCAGGGCAACGTGTTTTC |
| | | TTGTTCCGTGATGCATGAGGCTCTGCACAATCATTACACACAGAAGAGC |
| | | CTGTCTCTGTCCCCAGGCAAG |
| 188 | TNX04 VH-CH1- | CAGGTGCAGCTGGTGCAGAGCGGAGCTGAGGTGGTGAAGCCAGGAGCCT |
| | CH2-CH3 IgG1 | CTGTGAAGCTGTCCTGCAAGGCTAGCGGCTACATCTTCACCTCTTACTA |
| | (C220S, | TATGTATTGGGTGAAGCAGGCTCCAGGACAGGGCCTGGAGTGGATCGGC |
| | C226S, C229S, | GAGATCAACCCTTCTAATGGCGACACCAACTTCAATGAGAAGTTTAAGT |
| | P238S) (with | CCAAGGCTACCCTGACAGTGGATAAGTCTGCTTCCACAGCCTACATGGA |
| | terminal K) | GCTGTCCAGCCTGAGGTCCGAGGACACCGCCGTGTACTATTGCACAAGG |
| | | TCTGATGGCCGGAACGACATGGATTCCTGGGGCCAGGGCACCCTGGTGA |
| | | CAGTGTCTTCCGCTTCTACCAAGGGACCATCCGTGTTTCCACTGGCTCC |
| | | AAGCTCTAAGAGCACCTCTGGAGGAACAGCCGCTCTGGGATGTCTGGTG |
| | | AAGGACTATTTCCCAGAGCCCGTGACAGTGTCTTGGAACTCCGGCGCTC |
| | | TGACCTCTGGCGTGCACACATTTCCTGCCGTGCTGCAGTCCAGCGGCCT |
| | | GTACTCCCTGTCTTCCGTGGTGACCGTGCCAAGCTCTTCCCTGGGCACC |
| | | CAGACATATATCTGCAAGGTGAATCACAAGCCTTCCAATACAAAGGTGG |
| | | ACAAGAAGGTGGAGCCAAAGAGCTCTGATAAGACCCATACAAGCCCCCC |
| | | TTCTCCTGCTCCAGAGCTGCTGGGAGGCTCCAGCGTGTTCCTGTTTCCA |
| | | CCCAAGCCAAAGGACACCCTGATGATCAGCAGAACCCCCGAGGTGACAT |
| | | GCGTGGTGGTGGACGTGTCTCACGAGGACCCCGAGGTGAAGTTCAACTG |
| | | GTACGTGGATGGCGTGGAGGTGCATAATGCCAAGACCAAGCCTAGAGAG |
| | | GAGCAGTACAATAGCACCTATCGCGTGGTGTCTGTGCTGACAGTGCTGC |
| | | ACCAGGACTGGCTGAACGGCAAGGAGTATAAGTGCAAGGTGTCCAATAA |
| | | GGCTCTGCCCGCCCCTATCGAGAAGACCATCAGCAAGGCTAAGGGCCAG |
| | | CCTAGGGAGCCACAGGTGTACACACTGCCTCCATCCCGGGACGAGCTGA |
| | | CCAAGAACCAGGTGAGCCTGACATGTCTGGTGAAGGGCTTCTATCCAAG |
| | | CGATATCGCCGTGGAGTGGGAGTCTAATGGCCAGCCCGAGAACAATTAC |
| | | AAGACCACACCCCCTGTGCTGGACTCCGATGGCAGCTTCTTTCTGTATT |
| | | CCAAGCTGACCGTGGATAAGAGCCGCTGGCAGCAGGGCAACGTGTTTTC |
| | | CTGTAGCGTGATGCATGAGGCTCTGCACAATCATTACACACAGAAGTCT |
| | | CTGTCCCTGAGCCCTGGCAAG |
| 189 | TNX05 VH-CH1- | CAGGTGCAGCTGGTGCAGTCTGGAGCTGAGGTGGTGAAGCCTGGAGCTA |
| | CH2-CH3 IgG4 | GCGTGAAGCTGTCTTGCAAGGCTTCCGGCTACATCTTCACCTCCTACTA |
| | (S228P, | TATGTATTGGGTGAAGCAGGCTCCTGGACAGGGCCTGGAGTGGATCGGC |
| | L235A) (with | GAGATCAACCCATCCAATGGCGACACAAACTTCAATGAGAAGTTTAAGA |
| | terminal K) | GCAAGGCTACCCTGACAGTGGATAAGTCCGCCTCTACCGCCTACATGGA |
| | | GCTGTCCAGCCTGAGGAGCGAGGACACAGCCGTGTACTATTGTACCAGG |
| | | AGCGATGGCCGGAACGACATGGATTCTTGGGGCCAGGGCACACTGGTGA |
| | | CCGTGTCTTCCGCTAGCACAAAGGGACCATCCGTGTTCCCACTGGCTCC |
| | | ATGCTCCAGGAGCACATCTGAGTCCACCGCCGCTCTGGGCTGTCTGGTG |
| | | AAGGACTATTTCCCTGAGCCAGTGACCGTGTCCTGGAATAGCGGCGCTC |
| | | TGACATCCGGAGTGCACACCTTTCCAGCCGTGCTGCAGAGCTCTGGCCT |
| | | GTACAGCCTGTCCAGCGTGGTGACAGTGCCTTCTTCCAGCCTGGGCACC |
| | | AAGACATATACCTGCAACGTGGACCATAAGCCATCTAATACCAAGGTGG |
| | | ATAAGAGAGTGGAGTCCAAGTACGGACCACCTTGCCCACCATGTCCAGC |
| | | TCCTGAGTTCGCTGGAGGACCATCCGTGTTCCTGTTTCCTCCAAAGCCC |
| | | AAGGACACCCTGATGATCTCTCGCACACCAGAGGTGACCTGCGTGGTGG |
| | | TGGACGTGTCCCAGGAGGACCCCGAGGTGCAGTTCAACTGGTACGTGGA |
| | | TGGCGTGGAGGTGCACAATGCTAAGACCAAGCCCAGGGAGGAGCAGTTT |
| | | AACTCCACATACCGGGTGGTGAGCGTGCTGACCGTGCTGCATCAGGATT |
| | | GGCTGAACGGCAAGGAGTATAAGTGCAAGGTGAGCAATAAGGGCCTGCC |
| | | TTCTTCCATCGAGAAGACAATCTCTAAGGCTAAGGGCCAGCCTCGGGAG |
| | | CCACAGGTGTACACCCTGCCCCCTAGCCAGGAGGAGATGACAAAGAACC |
| | | AGGTGTCTCTGACCTGTCTGGTGAAGGGCTTCTATCCCTCCGACATCGC |
| | | CGTGGAGTGGGAGAGCAATGGCCAGCCTGAGAACAATTACAAGACCACA |
| | | CCACCCGTGCTGGACTCTGATGGCTCCTTCTTTCTGTATTCTAGACTGA |
| | | CCGTCGATAAGTCCCGCTGGCAGGAGGGCAACGTGTTTAGCTGCTCTGT |
| | | GATGCACGAGGCCCTGCACAATCATTACACCCAGAAGTCCCTGAGCCTG |
| | | TCTCTGGGCAAG |
| 307 | TNX06 VH-CH1- | CAGGTCCAGCTGGTCCAGTCAGGGGCTGAAGTGGTCAAACCCGGCGCCA |
| | CH2-CH3 IgG4 | GCGTGAAGCTGTCTTGCAAGGCTTCCGGCTACATCTTCACCAGCTACTA |
| | (wild type) | TATGTATTGGGTGAAGCAGGCTCCAGGACAGGGCCTGGAGTGGATCGGC |
| | (with | GAGATCAACCCTTCCAATGGCGACACAAACTTCAATGAGAAGTTTAAGA |
| | terminal K) | GCAAGGCCACCCTGACAGTGGATAAGAGCGCCTCTACCGCTTACATGGA |
| | | GCTGTCCAGCCTGAGGTCTGAGGACACAGCCGTGTACTATTGTACCAGG |
| | | AGCGATGGCCGGAACGACATGGATTCTTGGGGCCAGGGCACACTGGTGA |
| | | CCGTGTCTTCCGCCAGCACAAAGGGCCCTTCCGTGTTCCCCCTGGCTCC |
| | | TTGCTCCAGGAGCACATCTGAGTCCACCGCCGCTCTGGGCTGTCTGGTG |
| | | AAGGACTACTTCCCAGAGCCCGTGACCGTGTCCTGGAATAGCGGCGCCC |
| | | TGACATCCGGAGTGCACACCTTTCCAGCTGTGCTGCAGAGCTCTGGCCT |
| | | GTACAGCCTGTCCAGCGTGGTGACAGTGCCCTCTTCCAGCCTGGGCACC |
| | | AAGACATATACCTGCAACGTGGACCATAAGCCTTCTAATACCAAGGTGG |
| | | ATAAGAGAGTGGAGTCCAAGTACGGACCACCTTGCCCTAGCTGTCCTGC |
| | | TCCAGAGTTCCTGGGAGGACCTTCCGTGTTCCTGTTTCCACCCAAGCCA |
| | | AAGGACACACTGATGATCTCTCGCACACCTGAGGTGACCTGCGTGGTGG |
| | | TGGACGTGTCCCAGGAGGACCCCGAGGTGCAGTTCAACTGGTACGTGGA |
| | | TGGCGTGGAGGTGCACAATGCTAAGACCAAGCCAAGGGAGGAGCAGTTT |
| | | AACTCCACATACCGGGTGGTGAGCGTGCTGACCGTGCTGCATCAGGATT |
| | | GGCTGAACGGCAAGGAGTATAAGTGCAAGGTGAGCAATAAGGGCCTGCC |
| | | CTCTTCCATCGAGAAGACAATCTCTAAGGCTAAGGGACAGCCAAGGGAG |
| | | CCACAGGTGTACACCCTGCCTCCAAGCCAGGAGGAGATGACAAAGAACC |
| | | AGGTGTCTCTGACCTGTCTGGTGAAGGGCTTCTATCCATCTGACATCGC |
| | | TGTGGAGTGGGAGTCCAATGGCCAGCCCGAGAACAATTACAAGACCACA |
| | | CCCCCTGTGCTGGACTCTGATGGCTCCTTCTTTCTGTATTCTAGACTGA |
| | | CCGTGGATAAGTCCCGCTGGCAGGAGGGCAACGTGTTCTCCTGCTCTGT |
| | | GATGCACGAAGCACTGCACAATCATTACACTCAGAAGAGCCTGTCACTG |
| | | TCCCTGGGCAAA |
| 308 | TNX07 VH-CH1- | CAGGTCCAGCTGGTCCAGTCAGGGGCTGAAGTGGTCAAACCCGGCGCCA |
| | CH2-CH3 IgG4 | GCGTGAAGCTGTCTTGCAAGGCTTCCGGCTACATCTTCACCAGCTACTA |
| | (S228P) (with | TATGTATTGGGTGAAGCAGGCTCCAGGACAGGGCCTGGAGTGGATCGGC |
| | terminal K) | GAGATCAACCCTTCCAATGGCGACACAAACTTCAATGAGAAGTTTAAGA |
| | | GCAAGGCCACCCTGACAGTGGATAAGAGCGCCTCTACCGCTTACATGGA |
| | | GCTGTCCAGCCTGAGGTCTGAGGACACAGCCGTGTACTATTGTACCAGG |
| | | AGCGATGGCCGGAACGACATGGATTCTTGGGGCCAGGGCACACTGGTGA |
| | | CCGTGTCTTCCGCCAGCACAAAGGGCCCTTCCGTGTTCCCCCTGGCTCC |
| | | TTGCTCCAGGAGCACATCTGAGTCCACCGCCGCTCTGGGCTGTCTGGTG |
| | | AAGGACTACTTCCCAGAGCCCGTGACCGTGTCCTGGAATAGCGGCGCCC |
| | | TGACATCCGGAGTGCACACCTTTCCAGCTGTGCTGCAGAGCTCTGGCCT |
| | | GTACAGCCTGTCCAGCGTGGTGACAGTGCCCTCTTCCAGCCTGGGCACC |
| | | AAGACATATACCTGCAACGTGGACCATAAGCCTTCTAATACCAAGGTGG |
| | | ATAAGAGAGTGGAGTCCAAGTACGGACCACCTTGCCCTCCCTGTCCTGC |
| | | TCCAGAGTTCCTGGGAGGACCTTCCGTGTTCCTGTTTCCACCCAAGCCA |
| | | AAGGACACACTGATGATCTCTCGCACACCTGAGGTGACCTGCGTGGTGG |
| | | TGGACGTGTCCCAGGAGGACCCCGAGGTGCAGTTCAACTGGTACGTGGA |
| | | TGGCGTGGAGGTGCACAATGCTAAGACCAAGCCAAGGGAGGAGCAGTTT |
| | | AACTCCACATACCGGGTGGTGAGCGTGCTGACCGTGCTGCATCAGGATT |
| | | GGCTGAACGGCAAGGAGTATAAGTGCAAGGTGAGCAATAAGGGCCTGCC |
| | | CTCTTCCATCGAGAAGACAATCTCTAAGGCTAAGGGACAGCCAAGGGAG |
| | | CCACAGGTGTACACCCTGCCTCCAAGCCAGGAGGAGATGACAAAGAACC |
| | | AGGTGTCTCTGACCTGTCTGGTGAAGGGCTTCTATCCATCTGACATCGC |
| | | TGTGGAGTGGGAGTCCAATGGCCAGCCCGAGAACAATTACAAGACCACA |
| | | CCCCCTGTGCTGGACTCTGATGGCTCCTTCTTTCTGTATTCTAGACTGA |
| | | CCGTGGATAAGTCCCGCTGGCAGGAGGGCAACGTGTTCTCCTGCTCTGT |
| | | GATGCACGAAGCACTGCACAATCATTACACTCAGAAGAGCCTGTCACTG |
| | | TCCCTGGGCAAA |
| 309 | TNX08 VH-CH1- | CAGGTCCAGCTGGTCCAGTCAGGGGCTGAAGTGGTCAAACCCGGCGCCA |
| | CH2-CH3 (IgG4 | GCGTGAAGCTGTCTTGCAAGGCTTCCGGCTACATCTTCACCAGCTACTA |
| | S228P/L235E) | TATGTATTGGGTGAAGCAGGCTCCAGGACAGGGCCTGGAGTGGATCGGC |
| | (with | GAGATCAACCCTTCCAATGGCGACACAAACTTCAATGAGAAGTTTAAGA |
| | terminal K) | GCAAGGCCACCCTGACAGTGGATAAGAGCGCCTCTACCGCTTACATGGA |
| | | GCTGTCCAGCCTGAGGTCTGAGGACACAGCCGTGTACTATTGTACCAGG |
| | | AGCGATGGCCGGAACGACATGGATTCTTGGGGCCAGGGCACACTGGTGA |
| | | CCGTGTCTTCCGCCAGCACAAAGGGCCCTTCCGTGTTCCCCCTGGCTCC |
| | | TTGCTCCAGGAGCACATCTGAGTCCACCGCCGCTCTGGGCTGTCTGGTG |
| | | AAGGACTACTTCCCAGAGCCCGTGACCGTGTCCTGGAATAGCGGCGCCC |
| | | TGACATCCGGAGTGCACACCTTTCCAGCTGTGCTGCAGAGCTCTGGCCT |
| | | GTACAGCCTGTCCAGCGTGGTGACAGTGCCCTCTTCCAGCCTGGGCACC |
| | | AAGACATATACCTGCAACGTGGACCATAAGCCTTCTAATACCAAGGTGG |
| | | ATAAGAGAGTGGAGTCCAAGTACGGACCACCTTGCCCTCCCTGTCCTGC |
| | | TCCAGAGTTCGAGGGAGGACCTTCCGTGTTCCTGTTTCCACCCAAGCCA |
| | | AAGGACACACTGATGATCTCTCGCACACCTGAGGTGACCTGCGTGGTGG |
| | | TGGACGTGTCCCAGGAGGACCCCGAGGTGCAGTTCAACTGGTACGTGGA |
| | | TGGCGTGGAGGTGCACAATGCTAAGACCAAGCCAAGGGAGGAGCAGTTT |
| | | AACTCCACATACCGGGTGGTGAGCGTGCTGACCGTGCTGCATCAGGATT |
| | | GGCTGAACGGCAAGGAGTATAAGTGCAAGGTGAGCAATAAGGGCCTGCC |
| | | CTCTTCCATCGAGAAGACAATCTCTAAGGCTAAGGGACAGCCAAGGGAG |
| | | CCACAGGTGTACACCCTGCCTCCAAGCCAGGAGGAGATGACAAAGAACC |
| | | AGGTGTCTCTGACCTGTCTGGTGAAGGGCTTCTATCCATCTGACATCGC |
| | | TGTGGAGTGGGAGTCCAATGGCCAGCCCGAGAACAATTACAAGACCACA |
| | | CCCCCTGTGCTGGACTCTGATGGCTCCTTCTTTCTGTATTCTAGACTGA |
| | | CCGTGGATAAGTCCCGCTGGCAGGAGGGCAACGTGTTCTCCTGCTCTGT |
| | | GATGCACGAAGCACTGCACAATCATTACACTCAGAAGAGCCTGTCACTG |
| | | TCCCTGGGCAAA |
| 310 | TNX09 VH-CH1- | CAGGTCCAGCTGGTCCAGTCAGGGGCTGAAGTGGTCAAACCCGGCGCCA |
| | CH2-CH3 IgG4 | GCGTGAAGCTGTCTTGCAAGGCTTCCGGCTACATCTTCACCAGCTACTA |
| | (S228P/F234A/ | TATGTATTGGGTGAAGCAGGCTCCAGGACAGGGCCTGGAGTGGATCGGC |
| | L235A) (with | GAGATCAACCCTTCCAATGGCGACACAAACTTCAATGAGAAGTTTAAGA |
| | terminal K) | GCAAGGCCACCCTGACAGTGGATAAGAGCGCCTCTACCGCTTACATGGA |
| | | GCTGTCCAGCCTGAGGTCTGAGGACACAGCCGTGTACTATTGTACCAGG |
| | | AGCGATGGCCGGAACGACATGGATTCTTGGGGCCAGGGCACACTGGTGA |
| | | CCGTGTCTTCCGCCAGCACAAAGGGCCCTTCCGTGTTCCCCCTGGCTCC |
| | | TTGCTCCAGGAGCACATCTGAGTCCACCGCCGCTCTGGGCTGTCTGGTG |
| | | AAGGACTACTTCCCAGAGCCCGTGACCGTGTCCTGGAATAGCGGCGCCC |
| | | TGACATCCGGAGTGCACACCTTTCCAGCTGTGCTGCAGAGCTCTGGCCT |
| | | GTACAGCCTGTCCAGCGTGGTGACAGTGCCCTCTTCCAGCCTGGGCACC |
| | | AAGACATATACCTGCAACGTGGACCATAAGCCTTCTAATACCAAGGTGG |
| | | ATAAGAGAGTGGAGTCCAAGTACGGACCACCTTGCCCTCCCTGTCCTGC |
| | | TCCAGAGGCCGCCGGAGGACCTTCCGTGTTCCTGTTTCCACCCAAGCCA |
| | | AAGGACACACTGATGATCTCTCGCACACCTGAGGTGACCTGCGTGGTGG |
| | | TGGACGTGTCCCAGGAGGACCCCGAGGTGCAGTTCAACTGGTACGTGGA |
| | | TGGCGTGGAGGTGCACAATGCTAAGACCAAGCCAAGGGAGGAGCAGTTT |
| | | AACTCCACATACCGGGTGGTGAGCGTGCTGACCGTGCTGCATCAGGATT |
| | | GGCTGAACGGCAAGGAGTATAAGTGCAAGGTGAGCAATAAGGGCCTGCC |
| | | CTCTTCCATCGAGAAGACAATCTCTAAGGCTAAGGGACAGCCAAGGGAG |
| | | CCACAGGTGTACACCCTGCCTCCAAGCCAGGAGGAGATGACAAAGAACC |
| | | AGGTGTCTCTGACCTGTCTGGTGAAGGGCTTCTATCCATCTGACATCGC |
| | | TGTGGAGTGGGAGTCCAATGGCCAGCCCGAGAACAATTACAAGACCACA |
| | | CCCCCTGTGCTGGACTCTGATGGCTCCTTCTTTCTGTATTCTAGACTGA |
| | | CCGTGGATAAGTCCCGCTGGCAGGAGGGCAACGTGTTCTCCTGCTCTGT |
| | | GATGCACGAAGCACTGCACAATCATTACACTCAGAAGAGCCTGTCACTG |
| | | TCCCTGGGCAAA |
| 311 | TNX10 VH-CH1- | CAGGTCCAGCTGGTCCAGTCAGGTGCCGAAGTGGTCAAGCCCGGCGCCT |
| | CH2-CH3 IgG1 | CTGTGAAGCTGTCCTGCAAGGCTAGCGGCTACATCTTCACCTCCTACTA |
| | (L234A/L235A) | TATGTATTGGGTGAAGCAGGCTCCTGGACAGGGCCTGGAGTGGATCGGC |
| | (with | GAGATCAACCCATCTAATGGCGACACCAACTTCAATGAGAAGTTTAAGT |
| | terminal K) | CCAAGGCCACCCTGACAGTGGATAAGAGCGCCTCTACAGCTTACATGGA |
| | x = A or G | GCTGTCCAGCCTGAGGAGCGAGGACACCGCCGTGTACTATTGCACAAGG |
| | | TCTGATGGCCGGAACGACATGGATTCCTGGGGCCAGGGCACCCTGGTGA |
| | | CAGTGTCTTCCGCCTCTACCAAGGGCCCTTCCGTGTTTCCACTGGCTCC |
| | | CAGCTCTAAGTCCACCAGCGGAGGAACAGCCGCTCTGGGCTGTCTGGTG |
| | | AAGGACTACTTCCCAGAGCCCGTGACAGTGAGCTGGAACTCTGGCGCCC |
| | | TGACCAGCGGAGTGCACACATTTCCTGCTGTGCTGCAGTCCAGCGGCCT |
| | | GTACTCTCTGTCTTCCGTGGTGACCGTGCCAAGCTCTTCCCTGGGCACC |
| | | CAGACATATATCTGCAACGTGAATCACAAGCCAAGCAATACAAAGGTGG |
| | | ACAAGAAGGTGGAGCCCAAGTCTTGTGATAAGACCCATACATGCCCCCC |
| | | TTGTCCTGCTCCAGAGGCTGCTGGAGGACCATCCGTGTTCCTGTTTCCA |
| | | CCCAAGCCTAAGGACACCCTGATGATCTCCAGAACCCCAGAGGTGACAT |
| | | GCGTGGTGGTGGACGTGAGCCACGAGGACCCCGAGGTGAAGTTCAACTG |
| | | GTACGTGGATGGCGTGGAGGTGCATAATGCTAAGACCAAGCCAAGAGAG |
| | | GAGCAGTACAACAGCACCTATCGCGTGGTGTCTGTGCTGACAGTGCTGC |
| | | ATCAGGACTGGCTGAACGGCAAGGAGTATAAGTGCAAGGTGTCTAATAA |
| | | GGCCCTGCCCGCTCCTATCGAGAAGACCATCTCCAAGGCCAAGGGCCAG |
| | | CCTAGGGAGCCACAGGTGTACACACTGCCTCCATCCCGGGACGAGCTGA |
| | | CCAAGAACCAGGTGAGCCTGACATGTCTGGTGAAGGGCTTCTATCCCAG |
| | | CGATATCGCTGTGGAGTGGGAGTCTAATGGCCAGCCTGAGAACAATTAC |
| | | AAGACCACACCCCCTGTGCTGGACTCCGATGGCAGCTTCTTTCTGTATT |
| | | CCAAGCTGACCGTGGATAAGAGCCGCTGGCAGCAGGGCAACGTGTTCTC |
| | | CTGTTCCGTCATGCACGAGGCACTGCACAATCATTACACCCAGAAGTCA |
| | | CTGTCACTGTCACCAGGAAAx |
| 312 | TNX11 VH-CH1- | CAGGTCCAGCTGGTCCAGTCAGGTGCCGAAGTGGTCAAGCCCGGCGCCT |
| | CH2-CH3 IgG1 | CTGTGAAGCTGTCCTGCAAGGCTAGCGGCTACATCTTCACCTCCTACTA |
| | (C226S, | TATGTATTGGGTGAAGCAGGCTCCTGGACAGGGCCTGGAGTGGATCGGC |
| | C229S, P238S) | GAGATCAACCCATCTAATGGCGACACCAACTTCAATGAGAAGTTTAAGT |
| | (with | CCAAGGCCACCCTGACAGTGGATAAGAGCGCCTCTACAGCTTACATGGA |
| | terminal K) | GCTGTCCAGCCTGAGGAGCGAGGACACCGCCGTGTACTATTGCACAAGG |
| | x = A or G | TCTGATGGCCGGAACGACATGGATTCCTGGGGCCAGGGCACCCTGGTGA |
| | | CAGTGTCTTCCGCCTCTACCAAGGGCCCTTCCGTGTTTCCACTGGCTCC |
| | | CAGCTCTAAGTCCACCAGCGGAGGAACAGCCGCTCTGGGCTGTCTGGTG |
| | | AAGGACTACTTCCCAGAGCCCGTGACAGTGAGCTGGAACTCTGGCGCCC |
| | | TGACCAGCGGAGTGCACACATTTCCTGCTGTGCTGCAGTCCAGCGGCCT |
| | | GTACTCTCTGTCTTCCGTGGTGACCGTGCCAAGCTCTTCCCTGGGCACC |
| | | CAGACATATATCTGCAACGTGAATCACAAGCCAAGCAATACAAAGGTGG |
| | | ACAAGAAGGTGGAGCCCAAGTCTTGTGATAAGACCCATACAtccCCCCC |
| | | TTccCCTGCTCCAGAGCTGCTGGGAGGAAGCTCCGTGTTCCTGTTTCCA |
| | | CCCAAGCCTAAGGACACCCTGATGATCTCCAGAACCCCAGAGGTGACAT |
| | | GCGTGGTGGTGGACGTGAGCCACGAGGACCCCGAGGTGAAGTTCAACTG |
| | | GTACGTGGATGGCGTGGAGGTGCATAATGCTAAGACCAAGCCAAGAGAG |
| | | GAGCAGTACAACAGCACCTATCGCGTGGTGTCTGTGCTGACAGTGCTGC |
| | | ATCAGGACTGGCTGAACGGCAAGGAGTATAAGTGCAAGGTGTCTAATAA |
| | | GGCCCTGCCCGCTCCTATCGAGAAGACCATCTCCAAGGCCAAGGGCCAG |
| | | CCTAGGGAGCCACAGGTGTACACACTGCCTCCATCCCGGGACGAGCTGA |
| | | CCAAGAACCAGGTGAGCCTGACATGTCTGGTGAAGGGCTTCTATCCCAG |
| | | CGATATCGCTGTGGAGTGGGAGTCTAATGGCCAGCCTGAGAACAATTAC |
| | | AAGACCACACCCCCTGTGCTGGACTCCGATGGCAGCTTCTTTCTGTATT |
| | | CCAAGCTGACCGTGGATAAGAGCCGCTGGCAGCAGGGCAACGTGTTCTC |
| | | CTGTTCCGTCATGCACGAGGCACTGCACAATCATTACACCCAGAAGTCA |
| | | CTGTCACTGTCACCAGGAAAx |
| 313 | TNX12 VH-CH1- | CAGGTCCAGCTGGTCCAGTCAGGTGCCGAAGTGGTCAAGCCCGGCGCCT |
| | CH2-CH3 IgG1 | CTGTGAAGCTGTCCTGCAAGGCTAGCGGCTACATCTTCACCTCCTACTA |
| | (C229S, | TATGTATTGGGTGAAGCAGGCTCCTGGACAGGGCCTGGAGTGGATCGGC |
| | P238S) (with | GAGATCAACCCATCTAATGGCGACACCAACTTCAATGAGAAGTTTAAGT |
| | terminal K) | CCAAGGCCACCCTGACAGTGGATAAGAGCGCCTCTACAGCTTACATGGA |
| | x = A or G | GCTGTCCAGCCTGAGGAGCGAGGACACCGCCGTGTACTATTGCACAAGG |
| | | TCTGATGGCCGGAACGACATGGATTCCTGGGGCCAGGGCACCCTGGTGA |
| | | CAGTGTCTTCCGCCTCTACCAAGGGCCCTTCCGTGTTTCCACTGGCTCC |
| | | CAGCTCTAAGTCCACCAGCGGAGGAACAGCCGCTCTGGGCTGTCTGGTG |
| | | AAGGACTACTTCCCAGAGCCCGTGACAGTGAGCTGGAACTCTGGCGCCC |
| | | TGACCAGCGGAGTGCACACATTTCCTGCTGTGCTGCAGTCCAGCGGCCT |
| | | GTACTCTCTGTCTTCCGTGGTGACCGTGCCAAGCTCTTCCCTGGGCACC |
| | | CAGACATATATCTGCAACGTGAATCACAAGCCAAGCAATACAAAGGTGG |
| | | ACAAGAAGGTGGAGCCCAAGTCTTGTGATAAGACCCATACATGCCCCCC |
| | | TTCCCCTGCTCCAGAGCTGCTGGGAGGAAGcTCCGTGTTCCTGTTTCCA |
| | | CCCAAGCCTAAGGACACCCTGATGATCTCCAGAACCCCAGAGGTGACAT |
| | | GCGTGGTGGTGGACGTGAGCCACGAGGACCCCGAGGTGAAGTTCAACTG |
| | | GTACGTGGATGGCGTGGAGGTGCATAATGCTAAGACCAAGCCAAGAGAG |
| | | GAGCAGTACAACAGCACCTATCGCGTGGTGTCTGTGCTGACAGTGCTGC |
| | | ATCAGGACTGGCTGAACGGCAAGGAGTATAAGTGCAAGGTGTCTAATAA |
| | | GGCCCTGCCCGCTCCTATCGAGAAGACCATCTCCAAGGCCAAGGGCCAG |
| | | CCTAGGGAGCCACAGGTGTACACACTGCCTCCATCCCGGGACGAGCTGA |
| | | CCAAGAACCAGGTGAGCCTGACATGTCTGGTGAAGGGCTTCTATCCCAG |
| | | CGATATCGCTGTGGAGTGGGAGTCTAATGGCCAGCCTGAGAACAATTAC |
| | | AAGACCACACCCCCTGTGCTGGACTCCGATGGCAGCTTCTTTCTGTATT |
| | | CCAAGCTGACCGTGGATAAGAGCCGCTGGCAGCAGGGCAACGTGTTCTC |
| | | CTGTTCCGTCATGCACGAGGCACTGCACAATCATTACACCCAGAAGTCA |
| | | CTGTCACTGTCACCAGGAAAx |
| 314 | TNX13 VH-CH1- | CAGGTCCAGCTGGTCCAGTCAGGTGCCGAAGTGGTCAAGCCCGGCGCCT |
| | CH2-CH3 IgG1 | CTGTGAAGCTGTCCTGCAAGGCTAGCGGCTACATCTTCACCTCCTACTA |
| | (C226S, | TATGTATTGGGTGAAGCAGGCTCCTGGACAGGGCCTGGAGTGGATCGGC |
| | P238S) (with | GAGATCAACCCATCTAATGGCGACACCAACTTCAATGAGAAGTTTAAGT |
| | terminal K) | CCAAGGCCACCCTGACAGTGGATAAGAGCGCCTCTACAGCTTACATGGA |
| | x = A or G | GCTGTCCAGCCTGAGGAGCGAGGACACCGCCGTGTACTATTGCACAAGG |
| | | TCTGATGGCCGGAACGACATGGATTCCTGGGGCCAGGGCACCCTGGTGA |
| | | CAGTGTCTTCCGCCTCTACCAAGGGCCCTTCCGTGTTTCCACTGGCTCC |
| | | CAGCTCTAAGTCCACCAGCGGAGGAACAGCCGCTCTGGGCTGTCTGGTG |
| | | AAGGACTACTTCCCAGAGCCCGTGACAGTGAGCTGGAACTCTGGCGCCC |
| | | TGACCAGCGGAGTGCACACATTTCCTGCTGTGCTGCAGTCCAGCGGCCT |
| | | GTACTCTCTGTCTTCCGTGGTGACCGTGCCAAGCTCTTCCCTGGGCACC |
| | | CAGACATATATCTGCAACGTGAATCACAAGCCAAGCAATACAAAGGTGG |
| | | ACAAGAAGGTGGAGCCCAAGTCTTGTGATAAGACCCATACATCCCCCCC |
| | | TTGCCCTGCTCCAGAGCTGCTGGGAGGAAGCTCCGTGTTCCTGTTTCCA |
| | | CCCAAGCCTAAGGACACCCTGATGATCTCCAGAACCCCAGAGGTGACAT |
| | | GCGTGGTGGTGGACGTGAGCCACGAGGACCCCGAGGTGAAGTTCAACTG |
| | | GTACGTGGATGGCGTGGAGGTGCATAATGCTAAGACCAAGCCAAGAGAG |
| | | GAGCAGTACAACAGCACCTATCGCGTGGTGTCTGTGCTGACAGTGCTGC |
| | | ATCAGGACTGGCTGAACGGCAAGGAGTATAAGTGCAAGGTGTCTAATAA |
| | | GGCCCTGCCCGCTCCTATCGAGAAGACCATCTCCAAGGCCAAGGGCCAG |
| | | CCTAGGGAGCCACAGGTGTACACACTGCCTCCATCCCGGGACGAGCTGA |
| | | CCAAGAACCAGGTGAGCCTGACATGTCTGGTGAAGGGCTTCTATCCCAG |
| | | CGATATCGCTGTGGAGTGGGAGTCTAATGGCCAGCCTGAGAACAATTAC |
| | | AAGACCACACCCCCTGTGCTGGACTCCGATGGCAGCTTCTTTCTGTATT |
| | | CCAAGCTGACCGTGGATAAGAGCCGCTGGCAGCAGGGCAACGTGTTCTC |
| | | CTGTTCCGTCATGCACGAGGCACTGCACAATCATTACACCCAGAAGTCA |
| | | CTGTCACTGTCACCAGGAAAx |
| 315 | TNX14 VH-CH1- | CAGGTCCAGCTGGTCCAGTCAGGGGCTGAAGTGGTCAAAC |
| | CH2-CH3 IgG4 | CCGGCGCCAGCGTGAAGCTGTCTTGCAAGGCTTCCGGCTA |
| | (L115T, | CATCTTCACCAGCTACTATATGTATTGGGTGAAGCAGGCT |
| | S228P, L235A) | CCAGGACAGGGCCTGGAGTGGATCGGCGAGATCAACCCTT |
| | (with | CCAATGGCGACACAAACTTCAATGAGAAGTTTAAGAGCAA |
| | terminal K) | GGCCACCCTGACAGTGGATAAGAGCGCCTCTACCGCTTAC |
| | | ATGGAGCTGTCCAGCCTGAGGTCTGAGGACACAGCCGTGT |
| | | ACTATTGTACCAGGAGCGATGGCCGGAACGACATGGATTC |
| | | TTGGGGCCAGGGCACAACAGTGACCGTGTCTTCCGCCAGC |
| | | ACAAAGGGCCCTTCCGTGTTCCCCCTGGCTCCTTGCTCCA |
| | | GGAGCACATCTGAGTCCACCGCCGCTCTGGGCTGTCTGGT |
| | | GAAGGACTACTTCCCAGAGCCCGTGACCGTGTCCTGGAAT |
| | | AGCGGCGCCCTGACATCCGGAGTGCACACCTTTCCAGCTG |
| | | TGCTGCAGAGCTCTGGCCTGTACAGCCTGTCCAGCGTGGT |
| | | GACAGTGCCCTCTTCCAGCCTGGGCACCAAGACATATACC |
| | | TGCAACGTGGACCATAAGCCTTCTAATACCAAGGTGGATA |
| | | AGAGAGTGGAGTCCAAGTACGGACCACCTTGCCCTCCTTG |
| | | TCCTGCTCCAGAGTTCGCCGGAGGACCTTCCGTGTTCCTG |
| | | TTTCCACCCAAGCCAAAGGACACACTGATGATCTCTCGCA |
| | | CACCTGAGGTGACCTGCGTGGTGGTGGACGTGTCCCAGGA |
| | | GGACCCCGAGGTGCAGTTCAACTGGTACGTGGATGGCGTG |
| | | GAGGTGCACAATGCTAAGACCAAGCCAAGGGAGGAGCAGT |
| | | TTAACTCCACATACCGGGTGGTGAGCGTGCTGACCGTGCT |
| | | GCATCAGGATTGGCTGAACGGCAAGGAGTATAAGTGCAAG |
| | | GTGAGCAATAAGGGCCTGCCCTCTTCCATCGAGAAGACAA |
| | | TCTCTAAGGCTAAGGGACAGCCAAGGGAGCCACAGGTGTA |
| | | CACCCTGCCTCCAAGCCAGGAGGAGATGACAAAGAACCAG |
| | | GTGTCTCTGACCTGTCTGGTGAAGGGCTTCTATCCATCTG |
| | | ACATCGCTGTGGAGTGGGAGTCCAATGGCCAGCCCGAGAA |
| | | CAATTACAAGACCACACCCCCTGTGCTGGACTCTGATGGC |
| | | TCCTTCTTTCTGTATTCTAGACTGACCGTGGATAAGTCCC |
| | | GCTGGCAGGAGGGCAACGTGTTCTCCTGCTCTGTGATGCA |
| | | CGAAGCACTGCACAATCATTAGACTCAGAAGAGCCTGTCA |
| | | CTGTCCCTGGGCAAA |

Heavy Chain DNA Sequences WITH LEADER; with terminal K

| | | |
|---|---|---|
| 190 | TNX01 VH-CH1- | ATGCCACTGCTGCTGCTGCTGCCACTGCTGTGGGCTGGCGCTCTGGCTC |
| | CH2-CH3 | AGGTGCAGCTGGTGCAGTCTGGAGCTGAGGTGGTGAAGCCAGGCGCCTC |
| | IgG1(N297Q) | TGTGAAGCTGTCCTGCAAGGCTAGCGGCTACATCTTCACCTCCTACTAT |
| | (with | ATGTATTGGGTGAAGCAGGCTCCTGGACAGGGACTGGAGTGGATCGGCG |
| | terminal K) | AGATCAACCCATCTAATGGCGACACCAACTTCAATGAGAAGTTTAAGTC |
| | | CAAGGCTACCCTGACAGTGGATAAGTCCGCCTCTACAGCCTACATGGAG |
| | | CTGTCCAGCCTGAGAAGCGAGGACACCGCCGTGTACTATTGCACAAGGT |
| | | CTGATGGCCGGAACGACATGGATTCCTGGGGCCAGGGCACCCTGGTGAC |
| | | AGTGTCTTCCGCTTCTACCAAGGGCCCTTCCGTGTTTCCACTGGCTCCA |
| | | AGCTCTAAGTCCACCAGCGGAGGAACAGCCGCTCTGGGCTGTCTGGTGA |
| | | AGGACTATTTCCCTGAGCCAGTGACAGTGAGCTGGAACTCTGGCGCTCT |
| | | GACCTCCGGCGTGCACACATTTCCAGCCGTGCTGCAGTCCAGCGGCCTG |
| | | TACAGCCTGTCTTCCGTGGTGACCGTGCCAAGCTCTTCCCTGGGCACCC |
| | | AGACATATATCTGCAACGTGAATCATAAGCCCTCTAATACAAAGGTGGA |
| | | CAAGAAGGTGGAGCCCAAGTCTTGTGATAAAACACATACTTGCCCCCCT |
| | | TGTCCTGCACCAGAACTGCTGGGAGGACCTAGCGTGTTCCTGTTTCCAC |
| | | CCAAGCCAAAAGACACCCTGATGATTAGTAGAACCCCTGAGGTCACATG |
| | | CGTGGTCGTGGACGTGAGCCACGAGGACCCCGAGGTGAAGTTCAACTGG |
| | | TACGTGGACGGCGTGGAGGTGCACAATGCTAAGACCAAGCCCAGAGAGG |
| | | AGCAGTACCAGAGCACCTATCGCGTGGTGTCTGTGCTGACAGTGCTGCA |
| | | TCAGGATTGGCTGAACGGCAAGGAGTATAAGTGCAAGGTGAGCAATAAG |
| | | GCTCTGCCCGCCCCTATCGAGAAGACCATCTCTAAGGCTAAGGGCCAGC |
| | | CTAGGGAGCCACAGGTGTACACACTGCCCCCTTCCCGGGACGAGCTGAC |
| | | CAAGAACCAGGTGAGCCTGACATGTCTGGTGAAGGGCTTCTATCCCAGC |
| | | GATATCGCCGTGGAGTGGGAGTCTAATGGCCAGCCTGAGAACAATTACA |
| | | AGACCACACCACCCGTGCTGGACTCCGATGGCAGCTTCTTTCTGTATTC |
| | | CAAGCTGACCGTGGATAAGAGCCGCTGGCAGCAGGGCAACGTGTTTTCT |
| | | TGTTCCGTGATGCACGAGGCCCTGCACAATCATTACACACAGAAGAGCC |
| | | TGTCTCTGTCCCCTGGCAAG |
| 191 | TNX02 VH-CH1- | ATGCCCCTGCTGCTGCTGCTGCCTCTGCTGTGGGCTGGCGCTCTGGCTC |
| | CH2-CH3 IgG1 | AGGTGCAGCTGGTGCAGTCCGGAGCTGAGGTGGTGAAGCCAGGAGCCTC |
| | (wt) (with | TGTGAAGCTGTCCTGCAAGGCTAGCGGCTACATCTTCACCAGCTACTAT |
| | terminal K) | ATGTATTGGGTGAAGCAGGCTCCAGGACAGGGCCTGGAGTGGATCGGCG |
| | | AGATCAACCCTTCTAATGGCGACACCAACTTCAATGAGAAGTTTAAGTC |
| | | CAAGGCTACCCTGACAGTGGATAAGTCCGCCTCTACAGCCTACATGGAG |
| | | CTGTCCAGCCTGAGGTCTGAGGACACCGCCGTGTACTATTGCACAAGGT |
| | | CTGATGGCCGGAACGACATGGATTCCTGGGGCCAGGGCACCCTGGTGAC |
| | | AGTGTCTTCCGCTTCTACCAAGGGACCATCCGTGTTTCCACTGGCTCCA |
| | | AGCTCTAAGTCCACCAGCGGAGGAACAGCCGCTCTGGGCTGTCTGGTGA |
| | | AGGACTATTTCCCAGAGCCCGTGACAGTGAGCTGGAACTCTGGCGCTCT |
| | | GACCAGCGGCGTGCACACATTTCCAGCCGTGCTGCAGTCCAGCGGCCTG |
| | | TACTCTCTGTCTTCCGTGGTGACCGTGCCTAGCTCTTCCCTGGGCACCC |
| | | AGACATATATCTGCAACGTGAATCACAAGCCTAGCAATACAAAGGTGGA |
| | | CAAGAAGGTGGAGCCAAAGTCTTGTGATAAGACCCATACATGCCCCCCT |
| | | TGTCCTGCTCCAGAGCTGCTGGGAGGACCATCCGTGTTCCTGTTTCCAC |
| | | CCAAGCCCAAGGACACCCTGATGATCTCCAGAACCCCTGAGGTGACATG |
| | | CGTGGTGGTGGACGTGAGCCACGAGGACCCCGAGGTGAAGTTCAACTGG |
| | | TACGTGGATGGCGTGGAGGTGCATAATGCCAAGACCAAGCCTAGAGAGG |
| | | AGCAGTACAATAGCACCTATCGCGTGGTGTCTGTGCTGACAGTGCTGCA |
| | | CCAGGACTGGCTGAACGGCAAGGAGTATAAGTGCAAGGTGTCTAATAAG |
| | | GCTCTGCCCGCCCCTATCGAGAAGACCATCTCCAAGGCTAAGGGCCAGC |
| | | CTAGGGAGCCACAGGTGTACACACTGCCTCCATCCCGGGACGAGCTGAC |
| | | CAAGAACCAGGTGAGCCTGACATGTCTGGTGAAGGGCTTCTATCCAAGC |
| | | GATATCGCCGTGGAGTGGGAGTCTAATGGCCAGCCCGAGAACAATTACA |
| | | AGACCACACCCCCTGTGCTGGACTCCGATGGCAGCTTCTTTCTGTATTC |
| | | CAAGCTGACCGTGGATAAGAGCCGCTGGCAGCAGGGCAACGTGTTTTCT |
| | | TGTTCCGTGATGCATGAGGCTCTGCACAATCATTACACACAGAAGAGCC |
| | | TGTCTCTGTCCCCAGGCAAG |
| 192 | TNX03 VH-CH1- | ATGCCCCTGCTGCTGCTGCTGCCTCTGCTGTGGGCTGGCGCTCTGGCTC |
| | CH2-CH3 | AGGTGCAGCTGGTGCAGTCCGGAGCTGAGGTGGTGAAGCCAGGAGCCTC |
| | IgG1(N297G) | TGTGAAGCTGTCCTGCAAGGCTAGCGGCTACATCTTCACCAGCTACTAT |
| | (with | ATGTATTGGGTGAAGCAGGCTCCAGGACAGGGCCTGGAGTGGATCGGCG |
| | terminal K) | AGATCAACCCTTCTAATGGCGACACCAACTTCAATGAGAAGTTTAAGTC |
| | | CAAGGCTACCCTGACAGTGGATAAGTCCGCCTCTACAGCCTACATGGAG |
| | | CTGTCCAGCCTGAGGTCTGAGGACACCGCCGTGTACTATTGCACAAGGT |
| | | CTGATGGCCGGAACGACATGGATTCCTGGGGCCAGGGCACCCTGGTGAC |
| | | AGTGTCTTCCGCTTCTACCAAGGGACCATCCGTGTTTCCACTGGCTCCA |
| | | AGCTCTAAGTCCACCAGCGGAGGAACAGCCGCTCTGGGCTGTCTGGTGA |
| | | AGGACTATTTCCCAGAGCCCGTGACAGTGAGCTGGAACTCTGGCGCTCT |
| | | GACCAGCGGCGTGCACACATTTCCAGCCGTGCTGCAGTCCAGCGGCCTG |
| | | TACTCTCTGTCTTCCGTGGTGACCGTGCCTAGCTCTTCCCTGGGCACCC |
| | | AGACATATATCTGCAACGTGAATCACAAGCCTAGCAATACAAAGGTGGA |
| | | CAAGAAGGTGGAGCCAAAGTCTTGTGATAAGACCCATACATGCCCCCCT |
| | | TGTCCTGCTCCAGAGCTGCTGGGAGGACCATCCGTGTTCCTGTTTCCAC |
| | | CCAAGCCCAAGGACACCCTGATGATCTCCAGAACCCCTGAGGTGACATG |
| | | CGTGGTGGTGGACGTGAGCCACGAGGACCCCGAGGTGAAGTTCAACTGG |
| | | TACGTGGATGGCGTGGAGGTGCATAATGCCAAGACCAAGCCTAGAGAGG |
| | | AGCAGTACGGCAGCACCTATCGCGTGGTGTCTGTGCTGACAGTGCTGCA |
| | | CCAGGACTGGCTGAACGGCAAGGAGTATAAGTGCAAGGTGTCTAATAAG |
| | | GCTCTGCCCGCCCCTATCGAGAAGACCATCTCCAAGGCTAAGGGCCAGC |
| | | CTAGGGAGCCACAGGTGTACACACTGCCTCCATCCCGGGACGAGCTGAC |
| | | CAAGAACCAGGTGAGCCTGACATGTCTGGTGAAGGGCTTCTATCCAAGC |
| | | GATATCGCCGTGGAGTGGGAGTCTAATGGCCAGCCCGAGAACAATTACA |
| | | AGACCACACCCCCTGTGCTGGACTCCGATGGCAGCTTCTTTCTGTATTC |
| | | CAAGCTGACCGTGGATAAGAGCCGCTGGCAGCAGGGCAACGTGTTTTCT |
| | | TGTTCCGTGATGCATGAGGCTCTGCACAATCATTACACACAGAAGAGCC |
| | | TGTCTCTGTCCCCAGGCAAG |
| 193 | TNX04 VH-CH1- | ATGCCCCTGCTGCTGCTGCTGCCTCTGCTGTGGGCTGGCGCTCTGGCTC |
| | CH2-CH3 IgG1 | AGGTGCAGCTGGTGCAGAGCGGAGCTGAGGTGGTGAAGCCAGGAGCCTC |
| | (C220S, | TGTGAAGCTGTCCTGCAAGGCTAGCGGCTACATCTTCACCTCTTACTAT |
| | C226S, C229S, | ATGTATTGGGTGAAGCAGGCTCCAGGACAGGGCCTGGAGTGGATCGGCG |
| | P238S) (with | AGATCAACCCTTCTAATGGCGACACCAACTTCAATGAGAAGTTTAAGTC |
| | terminal K) | CAAGGCTACCCTGACAGTGGATAAGTCTGCTTCCACAGCCTACATGGAG |
| | | CTGTCCAGCCTGAGGTCCGAGGACACCGCCGTGTACTATTGCACAAGGT |
| | | CTGATGGCCGGAACGACATGGATTCCTGGGGCCAGGGCACCCTGGTGAC |
| | | AGTGTCTTCCGCTTCTACCAAGGGACCATCCGTGTTTCCACTGGCTCCA |
| | | AGCTCTAAGAGCACCTCTGGAGGAACAGCCGCTCTGGGATGTCTGGTGA |
| | | AGGACTATTTCCCAGAGCCCGTGACAGTGTCTTGGAACTCCGGCGCTCT |
| | | GACCTCTGGCGTGCACACATTTCCTGCCGTGCTGCAGTCCAGCGGCCTG |
| | | TACTCCCTGTCTTCCGTGGTGACCGTGCCAAGCTCTTCCCTGGGCACCC |
| | | AGACATATATCTGCAAGGTGAATCACAAGCCTTCCAATACAAAGGTGGA |
| | | CAAGAAGGTGGAGCCAAAGAGCTCTGATAAGACCCATACAAGCCCCCCT |
| | | TCTCCTGCTCCAGAGCTGCTGGGAGGCTCCAGCGTGTTCCTGTTTCCAC |
| | | CCAAGCCAAAGGACACCCTGATGATCAGCAGAACCCCCGAGGTGACATG |
| | | CGTGGTGGTGGACGTGTCTCACGAGGACCCCGAGGTGAAGTTCAACTGG |
| | | TACGTGGATGGCGTGGAGGTGCATAATGCCAAGACCAAGCCTAGAGAGG |
| | | AGCAGTACAATAGCACCTATCGCGTGGTGTCTGTGCTGACAGTGCTGCA |
| | | CCAGGACTGGCTGAACGGCAAGGAGTATAAGTGCAAGGTGTCCAATAAG |
| | | GCTCTGCCCGCCCCTATCGAGAAGACCATCAGCAAGGCTAAGGGCCAGC |
| | | CTAGGGAGCCACAGGTGTACACACTGCCTCCATCCCGGGACGAGCTGAC |
| | | CAAGAACCAGGTGAGCCTGACATGTCTGGTGAAGGGCTTCTATCCAAGC |
| | | GATATCGCCGTGGAGTGGGAGTCTAATGGCCAGCCCGAGAACAATTACA |
| | | AGACCACACCCCCTGTGCTGGACTCCGATGGCAGCTTCTTTCTGTATTC |
| | | CAAGCTGACCGTGGATAAGAGCCGCTGGCAGCAGGGCAACGTGTTTTCC |
| | | TGTAGCGTGATGCATGAGGCTCTGCACAATCATTACACACAGAAGTCTC |
| | | TGTCCCTGAGCCCTGGCAAG |
| 194 | TNX05 VH-CH1- | ATGCCCCTGCTGCTGCTGCTGCCTCTGCTGTGGGCTGGCGCTCTGGCTC |
| | CH2-CH3 IgG4 | AGGTGCAGCTGGTGCAGTCTGGAGCTGAGGTGGTGAAGCCTGGAGCTAG |
| | (S228P, | CGTGAAGCTGTCTTGCAAGGCTTCCGGCTACATCTTCACCTCCTACTAT |
| | L235A) (with | ATGTATTGGGTGAAGCAGGCTCCTGGACAGGGCCTGGAGTGGATCGGCG |
| | terminal K) | AGATCAACCCATCCAATGGCGACACAAACTTCAATGAGAAGTTTAAGAG |
| | | CAAGGCTACCCTGACAGTGGATAAGTCCGCCTCTACCGCCTACATGGAG |
| | | CTGTCCAGCCTGAGGAGCGAGGACACAGCCGTGTACTATTGTACCAGGA |
| | | GCGATGGCCGGAACGACATGGATTCTTGGGGCCAGGGCACACTGGTGAC |
| | | CGTGTCTTCCGCTAGCACAAAGGGACCATCCGTGTTCCCACTGGCTCCA |
| | | TGCTCCAGGAGCACATCTGAGTCCACCGCCGCTCTGGGCTGTCTGGTGA |
| | | AGGACTATTTCCCTGAGCCAGTGACCGTGTCCTGGAATAGCGGCGCTCT |
| | | GACATCCGGAGTGCACACCTTTCCAGCCGTGCTGCAGAGCTCTGGCCTG |
| | | TACAGCCTGTCCAGCGTGGTGACAGTGCCTTCTTCCAGCCTGGGCACCA |
| | | AGACATATACCTGCAACGTGGACCATAAGCCATCTAATACCAAGGTGGA |
| | | TAAGAGAGTGGAGTCCAAGTACGGACCACCTTGCCCACCATGTCCAGCT |
| | | CCTGAGTTCGCTGGAGGACCATCCGTGTTCCTGTTTCCTCCAAAGCCCA |
| | | AGGACACCCTGATGATCTCTCGCACACCAGAGGTGACCTGCGTGGTGGT |
| | | GGACGTGTCCCAGGAGGACCCCGAGGTGCAGTTCAACTGGTACGTGGAT |
| | | GGCGTGGAGGTGCACAATGCTAAGACCAAGCCCAGGGAGGAGCAGTTTA |
| | | ACTCCACATACCGGGTGGTGAGCGTGCTGACCGTGCTGCATCAGGATTG |
| | | GCTGAACGGCAAGGAGTATAAGTGCAAGGTGAGCAATAAGGGCCTGCCT |
| | | TCTTCCATCGAGAAGACAATCTCTAAGGCTAAGGGCCAGCCTCGGGAGC |
| | | CACAGGTGTACACCCTGCCCCCTAGCCAGGAGGAGATGACAAAGAACCA |
| | | GGTGTCTCTGACCTGTCTGGTGAAGGGCTTCTATCCCTCCGACATCGCC |
| | | GTGGAGTGGGAGAGCAATGGCCAGCCTGAGAACAATTACAAGACCACAC |
| | | CACCCGTGCTGGACTCTGATGGCTCCTTCTTTCTGTATTCTAGACTGAC |
| | | CGTCGATAAGTCCCGCTGGCAGGAGGGCAACGTGTTTAGCTGCTCTGTG |
| | | ATGCACGAGGCCCTGCACAATCATTACACCCAGAAGTCCCTGAGCCTGT |
| | | CTCTGGGCAAG |
| 316 | TNX06 VH-CH1- | ATGCCTCTGCTGCTGCTGCTGCCTCTGCTGTGGGCCGGTGCTCTGGCTC |
| | CH2-CH3 IgG4 | AGGTCCAGCTGGTCCAGTCAGGGGCTGAAGTGGTCAAACCCGGCGCCAG |
| | (wild type) | CGTGAAGCTGTCTTGCAAGGCTTCCGGCTACATCTTCACCAGCTACTAT |
| | (with | ATGTATTGGGTGAAGCAGGCTCCAGGACAGGGCCTGGAGTGGATCGGCG |
| | terminal K) | AGATCAACCCTTCCAATGGCGACACAAACTTCAATGAGAAGTTTAAGAG |
| | | CAAGGCCACCCTGACAGTGGATAAGAGCGCCTCTACCGCTTACATGGAG |
| | | CTGTCCAGCCTGAGGTCTGAGGACACAGCCGTGTACTATTGTACCAGGA |
| | | GCGATGGCCGGAACGACATGGATTCTTGGGGCCAGGGCACACTGGTGAC |
| | | CGTGTCTTCCGCCAGCACAAAGGGCCCTTCCGTGTTCCCCCTGGCTCCT |
| | | TGCTCCAGGAGCACATCTGAGTCCACCGCCGCTCTGGGCTGTCTGGTGA |
| | | AGGACTACTTCCCAGAGCCCGTGACCGTGTCCTGGAATAGCGGCGCCCT |
| | | GACATCCGGAGTGCACACCTTTCCAGCTGTGCTGCAGAGCTCTGGCCTG |
| | | TACAGCCTGTCCAGCGTGGTGACAGTGCCCTCTTCCAGCCTGGGCACCA |
| | | AGACATATACCTGCAACGTGGACCATAAGCCTTCTAATACCAAGGTGGA |
| | | TAAGAGAGTGGAGTCCAAGTACGGACCACCTTGCCCTAGCTGTCCTGCT |
| | | CCAGAGTTCCTGGGAGGACCTTCCGTGTTCCTGTTTCCACCCAAGCCAA |
| | | AGGACACACTGATGATCTCTCGCACACCTGAGGTGACCTGCGTGGTGGT |
| | | GGACGTGTCCCAGGAGGACCCCGAGGTGCAGTTCAACTGGTACGTGGAT |
| | | GGCGTGGAGGTGCACAATGCTAAGACCAAGCCAAGGGAGGAGCAGTTTA |
| | | ACTCCACATACCGGGTGGTGAGCGTGCTGACCGTGCTGCATCAGGATTG |
| | | GCTGAACGGCAAGGAGTATAAGTGCAAGGTGAGCAATAAGGGCCTGCCC |
| | | TCTTCCATCGAGAAGACAATCTCTAAGGCTAAGGGACAGCCAAGGGAGC |
| | | CACAGGTGTACACCCTGCCTCCAAGCCAGGAGGAGATGACAAAGAACCA |
| | | GGTGTCTCTGACCTGTCTGGTGAAGGGCTTCTATCCATCTGACATCGCT |
| | | GTGGAGTGGGAGTCCAATGGCCAGCCCGAGAACAATTACAAGACCACAC |
| | | CCCCTGTGCTGGACTCTGATGGCTCCTTCTTTCTGTATTCTAGACTGAC |
| | | CGTGGATAAGTCCCGCTGGCAGGAGGGCAACGTGTTCTCCTGCTCTGTG |
| | | ATGCACGAAGCACTGCACAATCATTACACTCAGAAGAGCCTGTCACTGT |
| | | CCCTGGGCAAA |
| 317 | TNX07 VH-CH1- | ATGCCTCTGCTGCTGCTGCTGCCTCTGCTGTGGGCCGGTGCTCTGGCTC |
| | CH2-CH3 IgG4 | AGGTCCAGCTGGTCCAGTCAGGGGCTGAAGTGGTCAAACCCGGCGCCAG |
| | (S228P) (with | CGTGAAGCTGTCTTGCAAGGCTTCCGGCTACATCTTCACCAGCTACTAT |
| | terminal K) | ATGTATTGGGTGAAGCAGGCTCCAGGACAGGGCCTGGAGTGGATCGGCG |
| | | AGATCAACCCTTCCAATGGCGACACAAACTTCAATGAGAAGTTTAAGAG |
| | | CAAGGCCACCCTGACAGTGGATAAGAGCGCCTCTACCGCTTACATGGAG |
| | | CTGTCCAGCCTGAGGTCTGAGGACACAGCCGTGTACTATTGTACCAGGA |
| | | GCGATGGCCGGAACGACATGGATTCTTGGGGCCAGGGCACACTGGTGAC |
| | | CGTGTCTTCCGCCAGCACAAAGGGCCCTTCCGTGTTCCCCCTGGCTCCT |
| | | TGCTCCAGGAGCACATCTGAGTCCACCGCCGCTCTGGGCTGTCTGGTGA |
| | | AGGACTACTTCCCAGAGCCCGTGACCGTGTCCTGGAATAGCGGCGCCCT |
| | | GACATCCGGAGTGCACACCTTTCCAGCTGTGCTGCAGAGCTCTGGCCTG |
| | | TACAGCCTGTCCAGCGTGGTGACAGTGCCCTCTTCCAGCCTGGGCACCA |
| | | AGACATATACCTGCAACGTGGACCATAAGCCTTCTAATACCAAGGTGGA |
| | | TAAGAGAGTGGAGTCCAAGTACGGACCACCTTGCCCTCCCTGTCCTGCT |
| | | CCAGAGTTCCTGGGAGGACCTTCCGTGTTCCTGTTTCCACCCAAGCCAA |
| | | AGGACACACTGATGATCTCTCGCACACCTGAGGTGACCTGCGTGGTGGT |
| | | GGACGTGTCCCAGGAGGACCCCGAGGTGCAGTTCAACTGGTACGTGGAT |
| | | GGCGTGGAGGTGCACAATGCTAAGACCAAGCCAAGGGAGGAGCAGTTTA |
| | | ACTCCACATACCGGGTGGTGAGCGTGCTGACCGTGCTGCATCAGGATTG |
| | | GCTGAACGGCAAGGAGTATAAGTGCAAGGTGAGCAATAAGGGCCTGCCC |
| | | TCTTCCATCGAGAAGACAATCTCTAAGGCTAAGGGACAGCCAAGGGAGC |
| | | CACAGGTGTACACCCTGCCTCCAAGCCAGGAGGAGATGACAAAGAACCA |
| | | GGTGTCTCTGACCTGTCTGGTGAAGGGCTTCTATCCATCTGACATCGCT |
| | | GTGGAGTGGGAGTCCAATGGCCAGCCCGAGAACAATTACAAGACCACAC |
| | | CCCCTGTGCTGGACTCTGATGGCTCCTTCTTTCTGTATTCTAGACTGAC |
| | | CGTGGATAAGTCCCGCTGGCAGGAGGGCAACGTGTTCTCCTGCTCTGTG |
| | | ATGCACGAAGCACTGCACAATCATTACACTCAGAAGAGCCTGTCACTGT |
| | | CCCTGGGCAAA |
| 318 | TNX08 VH-CH1- | ATGCCTCTGCTGCTGCTGCTGCCTCTGCTGTGGGCCGGTGCTCTGGCTC |
| | CH2-CH3 (IgG4 | AGGTCCAGCTGGTCCAGTCAGGGGCTGAAGTGGTCAAACCCGGCGCCAG |
| | S228P/L235E) | CGTGAAGCTGTCTTGCAAGGCTTCCGGCTACATCTTCACCAGCTACTAT |
| | (with | ATGTATTGGGTGAAGCAGGCTCCAGGACAGGGCCTGGAGTGGATCGGCG |
| | terminal K) | AGATCAACCCTTCCAATGGCGACACAAACTTCAATGAGAAGTTTAAGAG |
| | | CAAGGCCACCCTGACAGTGGATAAGAGCGCCTCTACCGCTTACATGGAG |
| | | CTGTCCAGCCTGAGGTCTGAGGACACAGCCGTGTACTATTGTACCAGGA |
| | | GCGATGGCCGGAACGACATGGATTCTTGGGGCCAGGGCACACTGGTGAC |
| | | CGTGTCTTCCGCCAGCACAAAGGGCCCTTCCGTGTTCCCCCTGGCTCCT |
| | | TGCTCCAGGAGCACATCTGAGTCCACCGCCGCTCTGGGCTGTCTGGTGA |
| | | AGGACTACTTCCCAGAGCCCGTGACCGTGTCCTGGAATAGCGGCGCCCT |
| | | GACATCCGGAGTGCACACCTTTCCAGCTGTGCTGCAGAGCTCTGGCCTG |
| | | TACAGCCTGTCCAGCGTGGTGACAGTGCCCTCTTCCAGCCTGGGCACCA |
| | | AGACATATACCTGCAACGTGGACCATAAGCCTTCTAATACCAAGGTGGA |
| | | TAAGAGAGTGGAGTCCAAGTACGGACCACCTTGCCCTCCCTGTCCTGCT |
| | | CCAGAGTTCGAGGGAGGACCTTCCGTGTTCCTGTTTCCACCCAAGCCAA |
| | | AGGACACACTGATGATCTCTCGCACACCTGAGGTGACCTGCGTGGTGGT |
| | | GGACGTGTCCCAGGAGGACCCCGAGGTGCAGTTCAACTGGTACGTGGAT |
| | | GGCGTGGAGGTGCACAATGCTAAGACCAAGCCAAGGGAGGAGCAGTTTA |
| | | ACTCCACATACCGGGTGGTGAGCGTGCTGACCGTGCTGCATCAGGATTG |
| | | GCTGAACGGCAAGGAGTATAAGTGCAAGGTGAGCAATAAGGGCCTGCCC |
| | | TCTTCCATCGAGAAGACAATCTCTAAGGCTAAGGGACAGCCAAGGGAGC |
| | | CACAGGTGTACACCCTGCCTCCAAGCCAGGAGGAGATGACAAAGAACCA |
| | | GGTGTCTCTGACCTGTCTGGTGAAGGGCTTCTATCCATCTGACATCGCT |
| | | GTGGAGTGGGAGTCCAATGGCCAGCCCGAGAACAATTACAAGACCACAC |
| | | CCCCTGTGCTGGACTCTGATGGCTCCTTCTTTCTGTATTCTAGACTGAC |
| | | CGTGGATAAGTCCCGCTGGCAGGAGGGCAACGTGTTCTCCTGCTCTGTG |
| | | ATGCACGAAGCACTGCACAATCATTACACTCAGAAGAGCCTGTCACTGT |
| | | CCCTGGGCAAA |
| 319 | TNX09 VH-CH1- | ATGCCTCTGCTGCTGCTGCTGCCTCTGCTGTGGGCCGGTGCTCTGGCTC |
| | CH2-CH3 IgG4 | AGGTCCAGCTGGTCCAGTCAGGGGCTGAAGTGGTCAAACCCGGCGCCAG |
| | (S228P/F234A/ | CGTGAAGCTGTCTTGCAAGGCTTCCGGCTACATCTTCACCAGCTACTAT |
| | L235A) (with | ATGTATTGGGTGAAGCAGGCTCCAGGACAGGGCCTGGAGTGGATCGGCG |
| | terminal K) | AGATCAACCCTTCCAATGGCGACACAAACTTCAATGAGAAGTTTAAGAG |
| | | CAAGGCCACCCTGACAGTGGATAAGAGCGCCTCTACCGCTTACATGGAG |
| | | CTGTCCAGCCTGAGGTCTGAGGACACAGCCGTGTACTATTGTACCAGGA |
| | | GCGATGGCCGGAACGACATGGATTCTTGGGGCCAGGGCACACTGGTGAC |
| | | CGTGTCTTCCGCCAGCACAAAGGGCCCTTCCGTGTTCCCCCTGGCTCCT |
| | | TGCTCCAGGAGCACATCTGAGTCCACCGCCGCTCTGGGCTGTCTGGTGA |
| | | AGGACTACTTCCCAGAGCCCGTGACCGTGTCCTGGAATAGCGGCGCCCT |
| | | GACATCCGGAGTGCACACCTTTCCAGCTGTGCTGCAGAGCTCTGGCCTG |
| | | TACAGCCTGTCCAGCGTGGTGACAGTGCCCTCTTCCAGCCTGGGCACCA |
| | | AGACATATACCTGCAACGTGGACCATAAGCCTTCTAATACCAAGGTGGA |
| | | TAAGAGAGTGGAGTCCAAGTACGGACCACCTTGCCCTCCCTGTCCTGCT |
| | | CCAGAGGCCGCCGGAGGACCTTCCGTGTTCCTGTTTCCACCCAAGCCAA |
| | | AGGACACACTGATGATCTCTCGCACACCTGAGGTGACCTGCGTGGTGGT |
| | | GGACGTGTCCCAGGAGGACCCCGAGGTGCAGTTCAACTGGTACGTGGAT |
| | | GGCGTGGAGGTGCACAATGCTAAGACCAAGCCAAGGGAGGAGCAGTTTA |
| | | ACTCCACATACCGGGTGGTGAGCGTGCTGACCGTGCTGCATCAGGATTG |
| | | GCTGAACGGCAAGGAGTATAAGTGCAAGGTGAGCAATAAGGGCCTGCCC |
| | | TCTTCCATCGAGAAGACAATCTCTAAGGCTAAGGGACAGCCAAGGGAGC |
| | | CACAGGTGTACACCCTGCCTCCAAGCCAGGAGGAGATGACAAAGAACCA |
| | | GGTGTCTCTGACCTGTCTGGTGAAGGGCTTCTATCCATCTGACATCGCT |
| | | GTGGAGTGGGAGTCCAATGGCCAGCCCGAGAACAATTACAAGACCACAC |
| | | CCCCTGTGCTGGACTCTGATGGCTCCTTCTTTCTGTATTCTAGACTGAC |
| | | CGTGGATAAGTCCCGCTGGCAGGAGGGCAACGTGTTCTCCTGCTCTGTG |
| | | ATGCACGAAGCACTGCACAATCATTACACTCAGAAGAGCCTGTCACTGT |
| | | CCCTGGGCAAA |
| 320 | TNX10 VH-CH1- | ATGCCTCTGCTGCTGCTGCTGCCTCTGCTGTGGGCCGGTGCCCTGGCTC |
| | CH2-CH3 IgG1 | AGGTCCAGCTGGTCCAGTCAGGTGCCGAAGTGGTCAAGCCCGGCGCCTC |
| | (L234A/L235A) | TGTGAAGCTGTCCTGCAAGGCTAGCGGCTACATCTTCACCTCCTACTAT |
| | (with | ATGTATTGGGTGAAGCAGGCTCCTGGACAGGGCCTGGAGTGGATCGGCG |
| | terminal K) | AGATCAACCCATCTAATGGCGACACCAACTTCAATGAGAAGTTTAAGTC |
| | x = A or G | CAAGGCCACCCTGACAGTGGATAAGAGCGCCTCTACAGCTTACATGGAG |
| | | CTGTCCAGCCTGAGGAGCGAGGACACCGCCGTGTACTATTGCACAAGGT |
| | | CTGATGGCCGGAACGACATGGATTCCTGGGGCCAGGGCACCCTGGTGAC |
| | | AGTGTCTTCCGCCTCTACCAAGGGCCCTTCCGTGTTTCCACTGGCTCCC |
| | | AGCTCTAAGTCCACCAGCGGAGGAACAGCCGCTCTGGGCTGTCTGGTGA |
| | | AGGACTACTTCCCAGAGCCCGTGACAGTGAGCTGGAACTCTGGCGCCCT |
| | | GACCAGCGGAGTGCACACATTTCCTGCTGTGCTGCAGTCCAGCGGCCTG |
| | | TACTCTCTGTCTTCCGTGGTGACCGTGCCAAGCTCTTCCCTGGGCACCC |
| | | AGACATATATCTGCAACGTGAATCACAAGCCAAGCAATACAAAGGTGGA |
| | | CAAGAAGGTGGAGCCCAAGTCTTGTGATAAGACCCATACATGCCCCCCT |
| | | TGTCCTGCTCCAGAGGCTGCTGGAGGACCATCCGTGTTCCTGTTTCCAC |
| | | CCAAGCCTAAGGACACCCTGATGATCTCCAGAACCCCAGAGGTGACATG |
| | | CGTGGTGGTGGACGTGAGCCACGAGGACCCCGAGGTGAAGTTCAACTGG |
| | | TACGTGGATGGCGTGGAGGTGCATAATGCTAAGACCAAGCCAAGAGAGG |
| | | AGCAGTACAACAGCACCTATCGCGTGGTGTCTGTGCTGACAGTGCTGCA |
| | | TCAGGACTGGCTGAACGGCAAGGAGTATAAGTGCAAGGTGTCTAATAAG |
| | | GCCCTGCCCGCTCCTATCGAGAAGACCATCTCCAAGGCCAAGGGCCAGC |
| | | CTAGGGAGCCACAGGTGTACACACTGCCTCCATCCCGGGACGAGCTGAC |
| | | CAAGAACCAGGTGAGCCTGACATGTCTGGTGAAGGGCTTCTATCCCAGC |
| | | GATATCGCTGTGGAGTGGGAGTCTAATGGCCAGCCTGAGAACAATTACA |
| | | AGACCACACCCCCTGTGCTGGACTCCGATGGCAGCTTCTTTCTGTATTC |
| | | CAAGCTGACCGTGGATAAGAGCCGCTGGCAGCAGGGCAACGTGTTCTCC |
| | | TGTTCCGTCATGCACGAGGCACTGCACAATCATTACACCCAGAAGTCAC |
| | | TGTCACTGTCACCAGGAAAx |
| 321 | TNX11 VH-CH1- | ATGCCTCTGCTGCTGCTGCTGCCTCTGCTGTGGGCCGGTGCCCTGGCTC |
| | CH2-CH3 IgG1 | AGGTCCAGCTGGTCCAGTCAGGTGCCGAAGTGGTCAAGCCCGGCGCCTC |
| | (C226S, | TGTGAAGCTGTCCTGCAAGGCTAGCGGCTACATCTTCACCTCCTACTAT |
| | C229S, P238S) | ATGTATTGGGTGAAGCAGGCTCCTGGACAGGGCCTGGAGTGGATCGGCG |
| | (with | AGATCAACCCATCTAATGGCGACACCAACTTCAATGAGAAGTTTAAGTC |
| | terminal K) | CAAGGCCACCCTGACAGTGGATAAGAGCGCCTCTACAGCTTACATGGAG |
| | x = A or G | CTGTCCAGCCTGAGGAGCGAGGACACCGCCGTGTACTATTGCACAAGGT |
| | | CTGATGGCCGGAACGACATGGATTCCTGGGGCCAGGGCACCCTGGTGAC |
| | | AGTGTCTTCCGCCTCTACCAAGGGCCCTTCCGTGTTTCCACTGGCTCCC |
| | | AGCTCTAAGTCCACCAGCGGAGGAACAGCCGCTCTGGGCTGTCTGGTGA |
| | | AGGACTACTTCCCAGAGCCCGTGACAGTGAGCTGGAACTCTGGCGCCCT |
| | | GACCAGCGGAGTGCACACATTTCCTGCTGTGCTGCAGTCCAGCGGCCTG |
| | | TACTCTCTGTCTTCCGTGGTGACCGTGCCAAGCTCTTCCCTGGGCACCC |
| | | AGACATATATCTGCAACGTGAATCACAAGCCAAGCAATACAAAGGTGGA |
| | | CAAGAAGGTGGAGCCCAAGTCTTGTGATAAGACCCATACAtccCCCCCT |
| | | TccCCTGCTCCAGAGCTGCTGGGAGGAAGCTCCGTGTTCCTGTTTCCAC |
| | | CCAAGCCTAAGGACACCCTGATGATCTCCAGAACCCCAGAGGTGACATG |
| | | CGTGGTGGTGGACGTGAGCCACGAGGACCCCGAGGTGAAGTTCAACTGG |
| | | TACGTGGATGGCGTGGAGGTGCATAATGCTAAGACCAAGCCAAGAGAGG |
| | | AGCAGTACAACAGCACCTATCGCGTGGTGTCTGTGCTGACAGTGCTGCA |
| | | TCAGGACTGGCTGAACGGCAAGGAGTATAAGTGCAAGGTGTCTAATAAG |
| | | GCCCTGCCCGCTCCTATCGAGAAGACCATCTCCAAGGCCAAGGGCCAGC |
| | | CTAGGGAGCCACAGGTGTACACACTGCCTCCATCCCGGGACGAGCTGAC |
| | | CAAGAACCAGGTGAGCCTGACATGTCTGGTGAAGGGCTTCTATCCCAGC |
| | | GATATCGCTGTGGAGTGGGAGTCTAATGGCCAGCCTGAGAACAATTACA |
| | | AGACCACACCCCCTGTGCTGGACTCCGATGGCAGCTTCTTTCTGTATTC |
| | | CAAGCTGACCGTGGATAAGAGCCGCTGGCAGCAGGGCAACGTGTTCTCC |
| | | TGTTCCGTCATGCACGAGGCACTGCACAATCATTACACCCAGAAGTCAC |
| | | TGTCACTGTCACCAGGAAAx |
| 322 | TNX12 VH-CH1- | ATGCCTCTGCTGCTGCTGCTGCCTCTGCTGTGGGCCGGTGCCCTGGCTC |
| | CH2-CH3 IgG1 | AGGTCCAGCTGGTCCAGTCAGGTGCCGAAGTGGTCAAGCCCGGCGCCTC |
| | (C229S, | TGTGAAGCTGTCCTGCAAGGCTAGCGGCTACATCTTCACCTCCTACTAT |
| | P238S) (with | ATGTATTGGGTGAAGCAGGCTCCTGGACAGGGCCTGGAGTGGATCGGCG |
| | terminal K) | AGATCAACCCATCTAATGGCGACACCAACTTCAATGAGAAGTTTAAGTC |
| | x = A or G | CAAGGCCACCCTGACAGTGGATAAGAGCGCCTCTACAGCTTACATGGAG |
| | | CTGTCCAGCCTGAGGAGCGAGGACACCGCCGTGTACTATTGCACAAGGT |
| | | CTGATGGCCGGAACGACATGGATTCCTGGGGCCAGGGCACCCTGGTGAC |
| | | AGTGTCTTCCGCCTCTACCAAGGGCCCTTCCGTGTTTCCACTGGCTCCC |
| | | AGCTCTAAGTCCACCAGCGGAGGAACAGCCGCTCTGGGCTGTCTGGTGA |
| | | AGGACTACTTCCCAGAGCCCGTGACAGTGAGCTGGAACTCTGGCGCCCT |
| | | GACCAGCGGAGTGCACACATTTCCTGCTGTGCTGCAGTCCAGCGGCCTG |
| | | TACTCTCTGTCTTCCGTGGTGACCGTGCCAAGCTCTTCCCTGGGCACCC |
| | | AGACATATATCTGCAACGTGAATCACAAGCCAAGCAATACAAAGGTGGA |
| | | CAAGAAGGTGGAGCCCAAGTCTTGTGATAAGACCCATACATGCCCCCCT |
| | | TCCCCTGCTCCAGAGCTGCTGGGAGGAAGcTCCGTGTTCCTGTTTCCAC |
| | | CCAAGCCTAAGGACACCCTGATGATCTCCAGAACCCCAGAGGTGACATG |
| | | CGTGGTGGTGGACGTGAGCCACGAGGACCCCGAGGTGAAGTTCAACTGG |
| | | TACGTGGATGGCGTGGAGGTGCATAATGCTAAGACCAAGCCAAGAGAGG |
| | | AGCAGTACAACAGCACCTATCGCGTGGTGTCTGTGCTGACAGTGCTGCA |
| | | TCAGGACTGGCTGAACGGCAAGGAGTATAAGTGCAAGGTGTCTAATAAG |
| | | GCCCTGCCCGCTCCTATCGAGAAGACCATCTCCAAGGCCAAGGGCCAGC |
| | | CTAGGGAGCCACAGGTGTACACACTGCCTCCATCCCGGGACGAGCTGAC |
| | | CAAGAACCAGGTGAGCCTGACATGTCTGGTGAAGGGCTTCTATCCCAGC |
| | | GATATCGCTGTGGAGTGGGAGTCTAATGGCCAGCCTGAGAACAATTACA |
| | | AGACCACACCCCCTGTGCTGGACTCCGATGGCAGCTTCTTTCTGTATTC |
| | | CAAGCTGACCGTGGATAAGAGCCGCTGGCAGCAGGGCAACGTGTTCTCC |
| | | TGTTCCGTCATGCACGAGGCACTGCACAATCATTACACCCAGAAGTCAC |
| | | TGTCACTGTCACCAGGAAAx |
| 323 | TNX13 VH-CH1- | ATGCCTCTGCTGCTGCTGCTGCCTCTGCTGTGGGCCGGTGCCCTGGCTC |
| | CH2-CH3 IgG1 | AGGTCCAGCTGGTCCAGTCAGGTGCCGAAGTGGTCAAGCCCGGCGCCTC |
| | (C226S, | TGTGAAGCTGTCCTGCAAGGCTAGCGGCTACATCTTCACCTCCTACTAT |
| | P238S) (with | ATGTATTGGGTGAAGCAGGCTCCTGGACAGGGCCTGGAGTGGATCGGCG |
| | terminal K) | AGATCAACCCATCTAATGGCGACACCAACTTCAATGAGAAGTTTAAGTC |
| | x = A or G | CAAGGCCACCCTGACAGTGGATAAGAGCGCCTCTACAGCTTACATGGAG |
| | | CTGTCCAGCCTGAGGAGCGAGGACACCGCCGTGTACTATTGCACAAGGT |
| | | CTGATGGCCGGAACGACATGGATTCCTGGGGCCAGGGCACCCTGGTGAC |
| | | AGTGTCTTCCGCCTCTACCAAGGGCCCTTCCGTGTTTCCACTGGCTCCC |
| | | AGCTCTAAGTCCACCAGCGGAGGAACAGCCGCTCTGGGCTGTCTGGTGA |
| | | AGGACTACTTCCCAGAGCCCGTGACAGTGAGCTGGAACTCTGGCGCCCT |
| | | GACCAGCGGAGTGCACACATTTCCTGCTGTGCTGCAGTCCAGCGGCCTG |
| | | TACTCTCTGTCTTCCGTGGTGACCGTGCCAAGCTCTTCCCTGGGCACCC |
| | | AGACATATATCTGCAACGTGAATCACAAGCCAAGCAATACAAAGGTGGA |
| | | CAAGAAGGTGGAGCCCAAGTCTTGTGATAAGACCCATACATCCCCCCCT |
| | | TGCCCTGCTCCAGAGCTGCTGGGAGGAAGCTCCGTGTTCCTGTTTCCAC |
| | | CCAAGCCTAAGGACACCCTGATGATCTCCAGAACCCCAGAGGTGACATG |
| | | CGTGGTGGTGGACGTGAGCCACGAGGACCCCGAGGTGAAGTTCAACTGG |
| | | TACGTGGATGGCGTGGAGGTGCATAATGCTAAGACCAAGCCAAGAGAGG |
| | | AGCAGTACAACAGCACCTATCGCGTGGTGTCTGTGCTGACAGTGCTGCA |
| | | TCAGGACTGGCTGAACGGCAAGGAGTATAAGTGCAAGGTGTCTAATAAG |
| | | GCCCTGCCCGCTCCTATCGAGAAGACCATCTCCAAGGCCAAGGGCCAGC |
| | | CTAGGGAGCCACAGGTGTACACACTGCCTCCATCCCGGGACGAGCTGAC |
| | | CAAGAACCAGGTGAGCCTGACATGTCTGGTGAAGGGCTTCTATCCCAGC |
| | | GATATCGCTGTGGAGTGGGAGTCTAATGGCCAGCCTGAGAACAATTACA |
| | | AGACCACACCCCCTGTGCTGGACTCCGATGGCAGCTTCTTTCTGTATTC |
| | | CAAGCTGACCGTGGATAAGAGCCGCTGGCAGCAGGGCAACGTGTTCTCC |
| | | TGTTCCGTCATGCACGAGGCACTGCACAATCATTACACCCAGAAGTCAC |
| | | TGTCACTGTCACCAGGAAAx |
| 324 | TNX14 VH-CH1- | ATGCCTCTGCTGCTGCTGCTGCCTCTGCTGTGGGCCGGTG |
| | CH2-CH3 IgG4 | CTCTGGCTCAGGTCCAGCTGGTCCAGTCAGGGGCTGAAGT |
| | (L115T, | GGTCAAACCCGGCGCCAGCGTGAAGCTGTCTTGCAAGGCT |
| | S228P, L235A) | TCCGGCTACATCTTCACCAGCTACTATATGTATTGGGTGA |
| | (with | AGCAGGCTCCAGGACAGGGCCTGGAGTGGATCGGCGAGAT |
| | terminal K) | CAACCCTTCCAATGGCGACACAAACTTCAATGAGAAGTTT |
| | | AAGAGCAAGGCCACCCTGACAGTGGATAAGAGCGCCTCTA |
| | | CCGCTTACATGGAGCTGTCCAGCCTGAGGTCTGAGGACAC |
| | | AGCCGTGTACTATTGTACCAGGAGCGATGGCCGGAACGAC |
| | | ATGGATTCTTGGGGCCAGGGCACAACAGTGACCGTGTCTT |
| | | CCGCCAGCACAAAGGGCCCTTCCGTGTTCCCCCTGGCTCC |
| | | TTGCTCCAGGAGCACATCTGAGTCCACCGCCGCTCTGGGC |
| | | TGTCTGGTGAAGGACTACTTCCCAGAGCCCGTGACCGTGT |
| | | CCTGGAATAGCGGCGCCCTGACATCCGGAGTGCACACCTT |
| | | TCCAGCTGTGCTGCAGAGCTCTGGCCTGTACAGCCTGTCC |
| | | AGCGTGGTGACAGTGCCCTCTTCCAGCCTGGGCACCAAGA |
| | | CATATACCTGCAACGTGGACCATAAGCCTTCTAATACCAA |
| | | GGTGGATAAGAGAGTGGAGTCCAAGTACGGACCACCTTGC |
| | | CCTCCTTGTCCTGCTCCAGAGTTCGCCGGAGGACCTTCCG |
| | | TGTTCCTGTTTCCACCCAAGCCAAAGGACACACTGATGAT |
| | | CTCTCGCACACCTGAGGTGACCTGCGTGGTGGTGGACGTG |
| | | TCCCAGGAGGACCCCGAGGTGCAGTTCAACTGGTACGTGG |
| | | ATGGCGTGGAGGTGCACAATGCTAAGACCAAGCCAAGGGA |
| | | GGAGCAGTTTAACTCCACATACCGGGTGGTGAGCGTGCTG |
| | | ACCGTGCTGCATCAGGATTGGCTGAACGGCAAGGAGTATA |
| | | AGTGCAAGGTGAGCAATAAGGGCCTGCCCTCTTCCATCGA |
| | | GAAGACAATCTCTAAGGCTAAGGGACAGCCAAGGGAGCCA |
| | | CAGGTGTACACCCTGCCTCCAAGCCAGGAGGAGATGACAA |
| | | AGAACCAGGTGTCTCTGACCTGTCTGGTGAAGGGCTTCTA |
| | | TCCATCTGACATCGCTGTGGAGTGGGAGTCCAATGGCCAG |
| | | CCCGAGAACAATTACAAGACCACACCCCCTGTGCTGGACT |
| | | CTGATGGCTCCTTCTTTCTGTATTCTAGACTGACCGTGGA |
| | | TAAGTCCCGCTGGCAGGAGGGCAACGTGTTCTCCTGCTCT |
| | | GTGATGCACGAAGCACTGCACAATCATTACACTCAGAAGA |
| | | GCCTGTCACTGTCCCTGGGCAAA |

Full light chain (VL-CL)

| | | |
|---|---|---|
| 195 | VL-CL protein | MRLPAQLLGLLMLWVSGSSGDIVLTQSPATLSVSPGERATISCRASQRV |
| | seq with | SSSTYSYMHWYQQKPGQPPKLLIKYASNLESGVPARFSGSGSGTDFTLT |
| | leader | ISSVEPEDFATYYCQHSWEIPPTFGGGTKLEIKRTVAAPSVFIFPPSDE |
| | | QLKSGTASVVCLLNNFYPREAKVQWKVDNALQSGNSQESVTEQDSKDST |
| | | YSLSSTLTLSKADYEKHKVYACEVTHQGLSSPVTKSFNRGEC |
| 196 | VL-CL protein | DIVLTQSPATLSVSPGERATISCRASQRVSSSTYSYMHWYQQKPGQPPK |
| | seq without | LLIKYASNLESGVPARFSGSGSGTDFTLTISSVEPEDFATYYCQHSWEI |
| | leader | PPTFGGGTKLEIKRTVAAPSVFIFPPSDEQLKSGTASVVCLLNNFYPRE |
| | | AKVQWKVDNALQSGNSQESVTEQDSKDSTYSLSSTLTLSKADYEKHKVY |
| | | ACEVTHQGLSSPVTKSFNRGEC |
| 197 | VL-CL | ATGAGGCTGCCAGCTCAGCTGCTGGGACTGCTG [symbol] CTGTGGGTGTCCG |
| | nucleotide | GCTCCAGCGGCGACATCGTGCTGACCCAGAGCCCAGCTACACTGTCCGT |
| | seq with | GTCCCCTGGAGAGAGGGCTACCATCAGCTGCAGGGCTTCTCAGCGGGTG |
| | leader | TCTTCCAGCACATACAGCTATATGCACTGGTACCAGCAGAAGCCAGGCC |
| | | AGCCCCCTAAGCTGCTGATCAAGTATGCCTCCAACCTGGAGAGCGGAGT |
| | | GCCAGCTAGATTCAGCGGCTCTGGCTCCGGCACCGACTTTACCCTGACA |
| | | ATCTCTTCCGTGGAGCCTGAGGATTTCGCCACATACTATTGCCAGCATT |
| | | CTTGGGAGATCCCACCCACCTTTGGCGGCGGCACAAAGCTGGAGATCAA |
| | | GAGAACCGTGGCCGCTCCTAGCGTGTTCATCTTTCCTCCATCTGACGAG |
| | | CAGCTGAAGTCTGGCACCGCTTCCGTGGTGTGCCTGCTGAACAATTTCT |
| | | ACCCACGCGAGGCCAAGGTGCAGTGGAAGGTGGATAACGCTCTGCAGAG |
| | | CGGCAATTCTCAGGAGTCCGTGACCGAGCAGGACAGCAAGGATTCTACA |
| | | TATTCCCTGAGCTCTACCCTGACACTGTCTAAGGCCGATTACGAGAAGC |
| | | ACAAGGTGTATGCTTGCGAGGTGACCCATCAGGGCCTGTCCAGCCCAGT |
| | | GACAAAGTCCTTTAATCGCGGCGAGTGT |
| 198 | VL-CL | CATCGTGCTGACCCAGAGCCCAGCTACACTGTCCGTGTCCCCTGGAGAG |
| | nucleotide | AGGGCTACCATCAGCTGCAGGGCTTCTCAGCGGGTGTCTTCCAGCACAT |
| | seq without | ACAGCTATATGCACTGGTACCAGCAGAAGCCAGGCCAGCCCCCTAAGCT |
| | leader | GCTGATCAAGTATGCCTCCAACCTGGAGAGCGGAGTGCCAGCTAGATTC |
| | | AGCGGCTCTGGCTCCGGCACCGACTTTACCCTGACAATCTCTTCCGTGG |
| | | AGCCTGAGGATTTCGCCACATACTATTGCCAGCATTCTTGGGAGATCCC |
| | | ACCCACCTTTGGCGGCGGCACAAAGCTGGAGATCAAGAGAACCGTGGCC |
| | | GCTCCTAGCGTGTTCATCTTTCCTCCATCTGACGAGCAGCTGAAGTCTG |
| | | GCACCGCTTCCGTGGTGTGCCTGCTGAACAATTTCTACCCACGCGAGGC |
| | | CAAGGTGCAGTGGAAGGTGGATAACGCTCTGCAGAGCGGCAATTCTCAG |
| | | GAGTCCGTGACCGAGCAGGACAGCAAGGATTCTACATATTCCCTGAGCT |
| | | CTACCCTGACACTGTCTAAGGCCGATTACGAGAAGCACAAGGTGTATGC |
| | | TTGCGAGGTGACCCATCAGGGCCTGTCCAGCCCAGTGACAAAGTCCTTT |
| | | AATCGCGGCGAGTGT |

Linkers

| | | |
|---|---|---|
| 199 | L1 | GGGGS |
| 200 | L2 | GGGGSGGGGS |
| 201 | L3 | GGGGSGGGGSGGGGS |
| 202 | L4 | GGGGSGGGGSGGGGSGGGGS |
| 203 | L5 | GGGGSGGGGSGGGGSGGGGSGGGGS |
| 204 | L6 | GSSGG |
| 205 | L7 | GSSGGGSSGG |
| 206 | L8 | GSSGGGSSGGGSSGG |
| 207 | L9 | GSSGGGSSGGGSSGGGSSGG |
| 208 | L10 | GSSGGGSSGGGSSGGGSSGGGSSGG |
| 209 | Lil | GGSGG |
| 210 | L12 | GGSGGGGSGG |
| 211 | L13 | GGSGGGGSGGGGSGG |
| 212 | L14 | GGSGGGGSGGGGSGGGGSGG |
| 213 | L15 | GGSGGGGSGGGGSGGGGSGGGGSGG |
| 214 | L16 | AS |
| 215 | L17 | AST |
| 216 | L18 | TVAAPS |
| 217 | L19 | TVA |
| 218 | L20 | ASTSGPS |
| 219 | L21 | KESGSVSSEQLAQFRSLD |
| 220 | L22 | EGKSSGSGSESKST |
| 221 | L23 | GGGGGG |
| 222 | L24 | GGGGGGGG |
| 223 | L25 | GSAGSAAGSGEF |
| 325 | CT-Long | EPKSSDK |
| 326 | CT-Long | ASTEPKSSDK |

Leader sequences

| | | |
|---|---|---|
| 224 | Heavy chain | MPLLLLLPLLWAGALA |
| | leader | |
| | sequence (AA) | |
| 225 | Light chain | MRLPAQLLGLLMLWVSGSSG |
| | leader | |
| | sequence (AA) | |
| 226 | Heavy chain | ATGCCACTGCTGCTGCTGCTGCCACTGCTGTGGGCTGGCGCTCTGGCT |
| | leader | |
| | sequence (NA) | |
| 227 | Light chain | ATGAGGCTGCCAGCTCAGCTGCTGGGACTGCTGATGCTGTGGGTGTCCG |
| | leader | GCTCCAGCGGCGA |
| | sequence (NA) | |

Misc sequences

| | | |
|---|---|---|
| 228 | EcoRI site | GAATTCGGCCGGCCACC |
| | sequence | |
| 229 | BamHI site | TAATGAACGCGTGGATCC |
| | sequence | |
| 230 | VD-CH2-CH3 | EVQLLESGGGLVQPGGSLRLSCAASGFTFNWELMGWARQAPGKGLEWVS |
| | (C220S, | GIEGPGDVTYYADSVKGRFTISRDNSKNTLYLQMNSLRAEDTAVYYCVK |
| | C226S, C229S, | VGKDAKSDYRGQGTLVTVSSASTEPKSSDKTHTSPPSPAPELLGGSSVF |
| | P238S) and | LFPPKPKDTLMISRTPEVTCVVVDVSHEDPEVKFNWYVDGVEVHNAKTK |
| | terminal K | PREEQYNSTYRVVSVLTVLHQDWLNGKEYKCKVSNKALPAPIEKTISKA |
| | Full Ab | KGQPREPQVYTLPPSRDELTKNQVSLTCLVKGFYPSDIAVEWESNGQPE |
| | | NNYKTTPPVLDSDGSFFLYSKLTVDKSRWQQGNVFSCSVMHEALHNHYT |
| | | QKSLSLSPGK |
| 231 | VD-CH2-CH3 | APELLGGSSVFLFPPKPKDTLMISRTPEVTCVVVDVSHEDPEVKFNWYV |
| | (C220S, | DGVEVHNAKTKPREEQYNSTYRVVSVLTVLHQDWLNGKEYKCKVSNKAL |
| | C226S, C229S, | PAPIEKTISKAKGQPREPQVYTLPPSRDELTKNQVSLTCLVKGFYPSDI |
| | P238S) and | AVEWESNGQPENNYKTTPPVLDSDGSFFLYSKLTVDKSRWQQGNVFSCS |
| | terminal K | VMHEALHNHYTQKSLSLSPGK |
| | Fc domain | |
| 232 | Fc region | EPKSSDKTHTSPPSPAPELLGGSSVFLFPPKPKDTLMISRTPEVTCVVV |
| | (C220S, | DVSHEDPEVKFNWYVDGVEVHNAKTKPREEQYNSTYRVVSVLTVLHQDW |
| | C226S, C229S, | LNGKEYKCKVSNKALPAPIEKTISKAKGQPREPQVYTLPPSRDELTKNQ |
| | P238S) and | VSLTCLVKGFYPSDIAVEWESNGQPENNYKTTPPVLDSDGSFFLYSKLT |
| | terminal K | VDKSRWQQGNVFSCSVMHEALHNHYTQKSLSLSPGK |
| | Fc region | |
| 233 | VH region | EVQLLESGGGLVQPGGSLRLSCAASGFTFNWELMGWARQAPGKGLEWVS |
| | | GIEGPGDVTYYADSVKGRFTISRDNSKNTLYLQMNSLRAEDTAVYYCVK |
| | | VGKDAKSDYRGQGTLVTVSS |
| 234 | TNX07 IgG4 | QVQLVQSGAEVVKPGASVKLSCKASGYIFTSYYMYWVKQAPGQGLEWIG |
| | heavy chain | EINPSNGDTNFNEKFKSKATLTVDKSASTAYMELSSLRSEDTAVYYCTR |
| | with K | SDGRNDMDSWGQGTLVTVSSASTKGPSVFPLAPCSRSTSESTAALGCLV |
| | (S228P) | KDYFPEPVTVSWNSGALTSGVHTFPAVLQSSGLYSLSSVVTVPSSSLGT |
| | | KTYTCNVDHKPSNTKVDKRVESKYGPPCPPCPAPEFLGGPSVFLFPPKP |
| | | KDTLMISRTPEVTCVVVDVSQEDPEVQFNWYVDGVEVHNAKTKPREEQF |
| | | NSTYRVVSVLTVLHQDWLNGKEYKCKVSNKGLPSSIEKTISKAKGQPRE |
| | | PQVYTLPPSQEEMTKNQVSLTCLVKGFYPSDIAVEWESNGQPENNYKTT |
| | | PPVLDSDGSFFLYSRLTVDKSRWQEGNVFSCSVMHEALHNHYTQKSLSL |
| | | SLGK |
| 235 | TNX07 IgG4 Fc | ESKYGPPCPPCPAPEFLGGPSVFLFPPKPKDTLMISRTPEVTCVVVDVS |
| | region | QEDPEVQFNWYVDGVEVHNAKTKPREEQFNSTYRVVSVLTVLHQDWLNG |
| | (S228P) and | KEYKCKVSNKGLPSSIEKTISKAKGQPREPQVYTLPPSQEEMTKNQVSL |
| | terminal K | TCLVKGFYPSDIAVEWESNGQPENNYKTTPPVLDSDGSFFLYSRLTVDK |
| | | SRWQEGNVFSCSVMHEALHNHYTQKSLSLSLGK |
| 236 | IgG4 Fc | APEFLGGPSVFLFPPKPKDTLMISRTPEVTCVVVDVSQEDPEVQFNWYV |
| | region and | DGVEVHNAKTKPREEQFNSTYRVVSVLTVLHQDWLNGKEYKCKVSNKGL |
| | terminal K | PSSIEKTISKAKGQPREPQVYTLPPSQEEMTKNQVSLTCLVKGFYPSDI |
| | Fc domain | AVEWESNGQPENNYKTTPPVLDSDGSFFLYSRLTVDKSRWQEGNVFSCS |
| | | VMHEALHNHYTQKSLSLSLGK |

Note that x = A or G in the listings above

The application's sequence listing, which the Patent Office published only in electronic form, follows.

SEQUENCE LISTING (331 sequences)

SEQ ID NO: 1 - protein, 216 aa, Artificial Sequence
  source: /note="Description of Artificial Sequence: Synthetic polypeptide"
APELLGGPSVFLFPPKPKDTLMISRTPEVTCVVVDVSHEDPEVKFNWYVDGVEVHNAKTKPREEQYQSTYRVVSVLTVLHQDWLNGKEYKCKVSNKALPAPIEKTISKAKGQPREPQVYTLPPSRDELTKNQVSLTCLVKGFYPSDIAVEWESNGQPENNYKTTPPVLDSDGSFFLYSKLTVDKSRWQQGNVFSCSVMHEALHNHYTQKSLSLSPG

SEQ ID NO: 2 - protein, 216 aa, Homo sapiens
APELLGGPSVFLFPPKPKDTLMISRTPEVTCVVVDVSHEDPEVKFNWYVDGVEVHNAKTKPREEQYNSTYRVVSVLTVLHQDWLNGKEYKCKVSNKALPAPIEKTISKAKGQPREPQVYTLPPSRDELTKNQVSLTCLVKGFYPSDIAVEWESNGQPENNYKTTPPVLDSDGSFFLYSKLTVDKSRWQQGNVFSCSVMHEALHNHYTQKSLSLSPG

SEQ ID NO: 3 - protein, 216 aa, Artificial Sequence
  source: /note="Description of Artificial Sequence: Synthetic polypeptide"
APELLGGPSVFLFPPKPKDTLMISRTPEVTCVVVDVSHEDPEVKFNWYVDGVEVHNAKTKPREEQYGSTYRVVSVLTVLHQDWLNGKEYKCKVSNKALPAPIEKTISKAKGQPREPQVYTLPPSRDELTKNQVSLTCLVKGFYPSDIAVEWESNGQPENNYKTTPPVLDSDGSFFLYSKLTVDKSRWQQGNVFSCSVMHEALHNHYTQKSLSLSPG

SEQ ID NO: 4 - protein, 216 aa, Artificial Sequence
  source: /note="Description of Artificial Sequence: Synthetic polypeptide"
APELLGGSSVFLFPPKPKDTLMISRTPEVTCVVVDVSHEDPEVKFNWYVDGVEVHNAKTKPREEQYNSTYRVVSVLTVLHQDWLNGKEYKCKVSNKALPAPIEKTISKAKGQPREPQVYTLPPSRDELTKNQVSLTCLVKGFYPSDIAVEWESNGQPENNYKTTPPVLDSDGSFFLYSKLTVDKSRWQQGNVFSCSVMHEALHNHYTQKSLSLSPG

SEQ ID NO: 5 - protein, 216 aa, Artificial Sequence
  source: /note="Description of Artificial Sequence: Synthetic polypeptide"
APEFAGGPSVFLFPPKPKDTLMISRTPEVTCVVVDVSQEDPEVQFNWYVDGVEVHNAKTKPREEQFNSTYRVVSVLTVLHQDWLNGKEYKCKVSNKGLPSSIEKTISKAKGQPREPQVYTLPPSQEEMTKNQVSLTCLVKGFYPSDIAVEWESNGQPENNYKTTPPVLDSDGSFFLYSRLTVDKSRWQEGNVFSCSVMHEALHNHYTQKSLSLSLG

SEQ ID NO: 6 - protein, 216 aa, Artificial Sequence
  source: /note="Description of Artificial Sequence: Synthetic polypeptide"
APEAAGGPSVFLFPPKPKDTLMISRTPEVTCVVVDVSHEDPEVKFNWYVDGVEVHNAKTKPREEQYNSTYRVVSVLTVLHQDWLNGKEYKCKVSNKALPAPIEKTISKAKGQPREPQVYTLPPSRDELTKNQVSLTCLVKGFYPSDIAVEWESNGQPENNYKTTPPVLDSDGSFFLYSKLTVDKSRWQQGNVFSCSVMHEALHNHYTQKSLSLSPG

SEQ ID NO: 7 - protein, 216 aa, Artificial Sequence
  source: /note="Description of Artificial Sequence: Synthetic polypeptide"
APELLGGSSVFLFPPKPKDTLMISRTPEVTCVVVDVSHEDPEVKFNWYVDGVEVHNAKTKPREEQYQSTYRVVSVLTVLHQDWLNGKEYKCKVSNKALPAPIEKTISKAKGQPREPQVYTLPPSRDELTKNQVSLTCLVKGFYPSDIAVEWESNGQPENNYKTTPPVLDSDGSFFLYSKLTVDKSRWQQGNVFSCSVMHEALHNHYTQKSLSLSPG

SEQ ID NO: 8 - protein, 216 aa, Homo sapiens
APEFLGGPSVFLFPPKPKDTLMISRTPEVTCVVVDVSQEDPEVQFNWYVDGVEVHNAKTKPREEQFNSTYRVVSVLTVLHQDWLNGKEYKCKVSNKGLPSSIEKTISKAKGQPREPQVYTLPPSQEEMTKNQVSLTCLVKGFYPSDIAVEWESNGQPENNYKTTPPVLDSDGSFFLYSRLTVDKSRWQEGNVFSCSVMHEALHNHYTQKSLSLSLG

SEQ ID NO: 9 - protein, 215 aa, Homo sapiens
APPVAGPSVFLFPPKPKDTLMISRTPEVTCVVVDVSHEDPEVQFNWYVDGMEVHNAKTKPREEQFNSTFRVVSVLTVVHQDWLNGKEYKCKVSNKGLPAPIEKTISKTKGQPREPQVYTLPPSREEMTKNQVSLTCLVKGFYPSDIAVEWESNGQPENNYKTTPPMLDSDGSFFLYSKLTVDKSRWQQGNVFSCSVMHEALHNHYTQKSLSLSPG

SEQ ID NO: 10 - protein, 217 aa, Artificial Sequence
  source: /note="Description of Artificial Sequence: Synthetic polypeptide"
APELLGGPSVFLFPPKPKDTLMISRTPEVTCVVVDVSHEDPEVKFNWYVDGVEVHNAKTKPREEQYQSTYRVVSVLTVLHQDWLNGKEYKCKVSNKALPAPIEKTISKAKGQPREPQVYTLPPSRDELTKNQVSLTCLVKGFYPSDIAVEWESNGQPENNYKTTPPVLDSDGSFFLYSKLTVDKSRWQQGNVFSCSVMHEALHNHYTQKSLSLSPGK

SEQ ID NO: 11 - protein, 217 aa, Homo sapiens
APELLGGPSVFLFPPKPKDTLMISRTPEVTCVVVDVSHEDPEVKFNWYVDGVEVHNAKTKPREEQYNSTYRVVSVLTVLHQDWLNGKEYKCKVSNKALPAPIEKTISKAKGQPREPQVYTLPPSRDELTKNQVSLTCLVKGFYPSDIAVEWESNGQPENNYKTTPPVLDSDGSFFLYSKLTVDKSRWQQGNVFSCSVMHEALHNHYTQKSLSLSPGK

SEQ ID NO: 12 - protein, 217 aa, Artificial Sequence
  source: /note="Description of Artificial Sequence: Synthetic polypeptide"
APELLGGPSVFLFPPKPKDTLMISRTPEVTCVVVDVSHEDPEVKFNWYVDGVEVHNAKTKPREEQYGSTYRVVSVLTVLHQDWLNGKEYKCKVSNKALPAPIEKTISKAKGQPREPQVYTLPPSRDELTKNQVSLTCLVKGFYPSDIAVEWESNGQPENNYKTTPPVLDSDGSFFLYSKLTVDKSRWQQGNVFSCSVMHEALHNHYTQKSLSLSPGK

SEQ ID NO: 13 - protein, 217 aa, Artificial Sequence
  source: /note="Description of Artificial Sequence: Synthetic polypeptide"
APELLGGSSVFLFPPKPKDTLMISRTPEVTCVVVDVSHEDPEVKFNWYVDGVEVHNAKTKPREEQYNSTYRVVSVLTVLHQDWLNGKEYKCKVSNKALPAPIEKTISKAKGQPREPQVYTLPPSRDELTKNQVSLTCLVKGFYPSDIAVEWESNGQPENNYKTTPPVLDSDGSFFLYSKLTVDKSRWQQGNVFSCSVMHEALHNHYTQKSLSLSPGK

SEQ ID NO: 14 - protein, 217 aa, Artificial Sequence
  source: /note="Description of Artificial Sequence: Synthetic polypeptide"
APEFAGGPSVFLFPPKPKDTLMISRTPEVTCVVVDVSQEDPEVQFNWYVDGVEVHNAKTKPREEQFNSTYRVVSVLTVLHQDWLNGKEYKCKVSNKGLPSSIEKTISKAKGQPREPQVYTLPPSQEEMTKNQVSLTCLVKGFYPSDIAVEWESNGQPENNYKTTPPVLDSDGSFFLYSRLTVDKSRWQEGNVFSCSVMHEALHNHYTQKSLSLSLGK

SEQ ID NO: 15 - protein, 217 aa, Artificial Sequence
  source: /note="Description of Artificial Sequence: Synthetic polypeptide"
APEAAGGPSVFLFPPKPKDTLMISRTPEVTCVVVDVSHEDPEVKFNWYVDGVEVHNAKTKPREEQYNSTYRVVSVLTVLHQDWLNGKEYKCKVSNKALPAPIEKTISKAKGQPREPQVYTLPPSRDELTKNQVSLTCLVKGFYPSDIAVEWESNGQPENNYKTTPPVLDSDGSFFLYSKLTVDKSRWQQGNVFSCSVMHEALHNHYTQKSLSLSPGK

SEQ ID NO: 16 - protein, 217 aa, Artificial Sequence
  source: /note="Description of Artificial Sequence: Synthetic polypeptide"
APELLGGSSVFLFPPKPKDTLMISRTPEVTCVVVDVSHEDPEVKFNWYVDGVEVHNAKTKPREEQYQSTYRVVSVLTVLHQDWLNGKEYKCKVSNKALPAPIEKTISKAKGQPREPQVYTLPPSRDELTKNQVSLTCLVKGFYPSDIAVEWESNGQPENNYKTTPPVLDSDGSFFLYSKLTVDKSRWQQGNVFSCSVMHEALHNHYTQKSLSLSPGK

SEQ ID NO: 17 - protein, 217 aa, Homo sapiens
APEFLGGPSVFLFPPKPKDTLMISRTPEVTCVVVDVSQEDPEVQFNWYVDGVEVHNAKTKPREEQFNSTYRVVSVLTVLHQDWLNGKEYKCKVSNKGLPSSIEKTISKAKGQPREPQVYTLPPSQEEMTKNQVSLTCLVKGFYPSDIAVEWESNGQPENNYKTTPPVLDSDGSFFLYSRLTVDKSRWQEGNVFSCSVMHEALHNHYTQKSLSLSLGK

SEQ ID NO: 18 - protein, 216 aa, Homo sapiens
APPVAGPSVFLFPPKPKDTLMISRTPEVTCVVVDVSHEDPEVQFNWYVDGMEVHNAKTKPREEQFNSTFRVVSVLTVVHQDWLNGKEYKCKVSNKGLPAPIEKTISKTKGQPREPQVYTLPPSREEMTKNQVSLTCLVKGFYPSDIAVEWESNGQPENNYKTTPPMLDSDGSFFLYSKLTVDKSRWQQGNVFSCSVMHEALHNHYTQKSLSLSPGK

SEQ ID NO: 19 - protein, 231 aa, Artificial Sequence
  source: /note="Description of Artificial Sequence: Synthetic polypeptide"
EPKSCDKTHTCPPCPAPELLGGPSVFLFPPKPKDTLMISRTPEVTCVVVDVSHEDPEVKFNWYVDGVEVHNAKTKPREEQYQSTYRVVSVLTVLHQDWLNGKEYKCKVSNKALPAPIEKTISKAKGQPREPQVYTLPPSRDELTKNQVSLTCLVKGFYPSDIAVEWESNGQPENNYKTTPPVLDSDGSFFLYSKLTVDKSRWQQGNVFSCSVMHEALHNHYTQKSLSLSPG

SEQ ID NO: 20 - protein, 231 aa, Homo sapiens
EPKSCDKTHTCPPCPAPELLGGPSVFLFPPKPKDTLMISRTPEVTCVVVDVSHEDPEVKFNWYVDGVEVHNAKTKPREEQYNSTYRVVSVLTVLHQDWLNGKEYKCKVSNKALPAPIEKTISKAKGQPREPQVYTLPPSRDELTKNQVSLTCLVKGFYPSDIAVEWESNGQPENNYKTTPPVLDSDGSFFLYSKLTVDKSRWQQGNVFSCSVMHEALHNHYTQKSLSLSPG

SEQ ID NO: 21 - protein, 231 aa, Artificial Sequence
  source: /note="Description of Artificial Sequence: Synthetic polypeptide"
EPKSCDKTHTCPPCPAPELLGGPSVFLFPPKPKDTLMISRTPEVTCVVVDVSHEDPEVKFNWYVDGVEVHNAKTKPREEQYGSTYRVVSVLTVLHQDWLNGKEYKCKVSNKALPAPIEKTISKAKGQPREPQVYTLPPSRDELTKNQVSLTCLVKGFYPSDIAVEWESNGQPENNYKTTPPVLDSDGSFFLYSKLTVDKSRWQQGNVFSCSVMHEALHNHYTQKSLSLSPG

SEQ ID NO: 22 - protein, 231 aa, Artificial Sequence
  source: /note="Description of Artificial Sequence: Synthetic polypeptide"
EPKSSDKTHTSPPSPAPELLGGSSVFLFPPKPKDTLMISRTPEVTCVVVDVSHEDPEVKFNWYVDGVEVHNAKTKPREEQYNSTYRVVSVLTVLHQDWLNGKEYKCKVSNKALPAPIEKTISKAKGQPREPQVYTLPPSRDELTKNQVSLTCLVKGFYPSDIAVEWESNGQPENNYKTTPPVLDSDGSFFLYSKLTVDKSRWQQGNVFSCSVMHEALHNHYTQKSLSLSPG

SEQ ID NO: 23 - protein, 228 aa, Artificial Sequence
  source: /note="Description of Artificial Sequence: Synthetic polypeptide"
ESKYGPPCPPCPAPEFAGGPSVFLFPPKPKDTLMISRTPEVTCVVVDVSQEDPEVQFNWYVDGVEVHNAKTKPREEQFNSTYRVVSVLTVLHQDWLNGKEYKCKVSNKGLPSSIEKTISKAKGQPREPQVYTLPPSQEEMTKNQVSLTCLVKGFYPSDIAVEWESNGQPENNYKTTPPVLDSDGSFFLYSRLTVDKSRWQEGNVFSCSVMHEALHNHYTQKSLSLSLG

SEQ ID NO: 24 - protein, 231 aa, Artificial Sequence
  source: /note="Description of Artificial Sequence: Synthetic polypeptide"
EPKSCDKTHTCPPCPAPEAAGGPSVFLFPPKPKDTLMISRTPEVTCVVVDVSHEDPEVKFNWYVDGVEVHNAKTKPREEQYNSTYRVVSVLTVLHQDWLNGKEYKCKVSNKALPAPIEKTISKAKGQPREPQVYTLPPSRDELTKNQVSLTCLVKGFYPSDIAVEWESNGQPENNYKTTPPVLDSDGSFFLYSKLTVDKSRWQQGNVFSCSVMHEALHNHYTQKSLSLSPG

SEQ ID NO: 25 - protein, 231 aa, Artificial Sequence
  source: /note="Description of Artificial Sequence: Synthetic polypeptide"
EPKSCDKTHTCPPCPAPELLGGSSVFLFPPKPKDTLMISRTPEVTCVVVDVSHEDPEVKFNWYVDGVEVHNAKTKPREEQYNSTYRVVSVLTVLHQDWLNGKEYKCKVSNKALPAPIEKTISKAKGQPREPQVYTLPPSRDELTKNQVSLTCLVKGFYPSDIAVEWESNGQPENNYKTTPPVLDSDGSFFLYSKLTVDKSRWQQGNVFSCSVMHEALHNHYTQKSLSLSPG

SEQ ID NO: 26 - protein, 231 aa, Artificial Sequence
  source: /note="Description of Artificial Sequence: Synthetic polypeptide"
EPKSCDKTHTCPPCPAPELLGGSSVFLFPPKPKDTLMISRTPEVTCVVVDVSHEDPEVKFNWYVDGVEVHNAKTKPREEQYQSTYRVVSVLTVLHQDWLNGKEYKCKVSNKALPAPIEKTISKAKGQPREPQVYTLPPSRDELTKNQVSLTCLVKGFYPSDIAVEWESNGQPENNYKTTPPVLDSDGSFFLYSKLTVDKSRWQQGNVFSCSVMHEALHNHYTQKSLSLSPG

SEQ ID NO: 27 - protein, 228 aa, Homo sapiens
ESKYGPPCPSCPAPEFLGGPSVFLFPPKPKDTLMISRTPEVTCVVVDVSQEDPEVQFNWYVDGVEVHNAKTKPREEQFNSTYRVVSVLTVLHQDWLNGKEYKCKVSNKGLPSSIEKTISKAKGQPREPQVYTLPPSQEEMTKNQVSLTCLVKGFYPSDIAVEWESNGQPENNYKTTPPVLDSDGSFFLYSRLTVDKSRWQEGNVFSCSVMHEALHNHYTQKSLSLSLG

SEQ ID NO: 28 - protein, 227 aa, Homo sapiens
ERKCCVECPPCPAPPVAGPSVFLFPPKPKDTLMISRTPEVTCVVVDVSHEDPEVQFNWYVDGMEVHNAKTKPREEQFNSTFRVVSVLTVVHQDWLNGKEYKCKVSNKGLPAPIEKTISKTKGQPREPQVYTLPPSREEMTKNQVSLTCLVKGFYPSDIAVEWESNGQPENNYKTTPPMLDSDGSFFLYSKLTVDKSRWQQGNVFSCSVMHEALHNHYTQKSLSLSPG

SEQ ID NO: 29 - protein, 231 aa, Artificial Sequence
  source: /note="Description of Artificial Sequence: Synthetic polypeptide"
EPKSSDKTHTSPPSPAPELLGGSSVFLFPPKPKDTLMISRTPEVTCVVVDVSHEDPEVKFNWYVDGVEVHNAKTKPREEQYQSTYRVVSVLTVLHQDWLNGKEYKCKVSNKALPAPIEKTISKAKGQPREPQVYTLPPSRDELTKNQVSLTCLVKGFYPSDIAVEWESNGQPENNYKTTPPVLDSDGSFFLYSKLTVDKSRWQQGNVFSCSVMHEALHNHYTQKSLSLSPG

SEQ ID NO: 30 - protein, 231 aa, Artificial Sequence
  source: /note="Description of Artificial Sequence: Synthetic polypeptide"
EPKSSDKTHTSPPSPAPELLGGPSVFLFPPKPKDTLMISRTPEVTCVVVDVSHEDPEVKFNWYVDGVEVHNAKTKPREEQYNSTYRVVSVLTVLHQDWLNGKEYKCKVSNKALPAPIEKTISKAKGQPREPQVYTLPPSRDELTKNQVSLTCLVKGFYPSDIAVEWESNGQPENNYKTTPPVLDSDGSFFLYSKLTVDKSRWQQGNVFSCSVMHEALHNHYTQKSLSLSPG

SEQ ID NO: 31 - protein, 231 aa, Artificial Sequence
  source: /note="Description of Artificial Sequence: Synthetic polypeptide"
EPKSSDKTHTCPPCPAPELLGGPSVFLFPPKPKDTLMISRTPEVTCVVVDVSHEDPEVKFNWYVDGVEVHNAKTKPREEQYQSTYRVVSVLTVLHQDWLNGKEYKCKVSNKALPAPIEKTISKAKGQPREPQVYTLPPSRDELTKNQVSLTCLVKGFYPSDIAVEWESNGQPENNYKTTPPVLDSDGSFFLYSKLTVDKSRWQQGNVFSCSVMHEALHNHYTQKSLSLSPG

SEQ ID NO: 32 - protein, 224 aa, Artificial Sequence
  source: /note="Description of Artificial Sequence: Synthetic polypeptide"
THTSPPSPAPELLGGSSVFLFPPKPKDTLMISRTPEVTCVVVDVSHEDPEVKFNWYVDGVEVHNAKTKPREEQYNSTYRVVSVLTVLHQDWLNGKEYKCKVSNKALPAPIEKTISKAKGQPREPQVYTLPPSRDELTKNQVSLTCLVKGFYPSDIAVEWESNGQPENNYKTTPPVLDSDGSFFLYSKLTVDKSRWQQGNVFSCSVMHEALHNHYTQKSLSLSPG

SEQ ID NO: 33 - protein, 224 aa, Artificial Sequence
  source: /note="Description of Artificial Sequence: Synthetic polypeptide"
THTSPPSPAPELLGGPSVFLFPPKPKDTLMISRTPEVTCVVVDVSHEDPEVKFNWYVDGVEVHNAKTKPREEQYNSTYRVVSVLTVLHQDWLNGKEYKCKVSNKALPAPIEKTISKAKGQPREPQVYTLPPSRDELTKNQVSLTCLVKGFYPSDIAVEWESNGQPENNYKTTPPVLDSDGSFFLYSKLTVDKSRWQQGNVFSCSVMHEALHNHYTQKSLSLSPG

SEQ ID NO: 34 - protein, 224 aa, Artificial Sequence
  source: /note="Description of Artificial Sequence: Synthetic polypeptide"
THTSPPSPAPELLGGSSVFLFPPKPKDTLMISRTPEVTCVVVDVSHEDPEVKFNWYVDGVEVHNAKTKPREEQYQSTYRVVSVLTVLHQDWLNGKEYKCKVSNKALPAPIEKTISKAKGQPREPQVYTLPPSRDELTKNQVSLTCLVKGFYPSDIAVEWESNGQPENNYKTTPPVLDSDGSFFLYSKLTVDKSRWQQGNVFSCSVMHEALHNHYTQKSLSLSPG

SEQ ID NO: 35 - protein, 224 aa, Artificial Sequence
  source: /note="Description of Artificial Sequence: Synthetic polypeptide"
THTSPPSPAPELLGGPSVFLFPPKPKDTLMISRTPEVTCVVVDVSHEDPEVKFNWYVDGVEVHNAKTKPREEQYQSTYRVVSVLTVLHQDWLNGKEYKCKVSNKALPAPIEKTISKAKGQPREPQVYTLPPSRDELTKNQVSLTCLVKGFYPSDIAVEWESNGQPENNYKTTPPVLDSDGSFFLYSKLTVDKSRWQQGNVFSCSVMHEALHNHYTQKSLSLSPG

SEQ ID NO: 36 - protein, 224 aa, Artificial Sequence
  source: /note="Description of Artificial Sequence: Synthetic polypeptide"
THTCPPCPAPELLGGPSVFLFPPKPKDTLMISRTPEVTCVVVDVSHEDPEVKFNWYVDGVEVHNAKTKPREEQYQSTYRVVSVLTVLHQDWLNGKEYKCKVSNKALPAPIEKTISKAKGQPREPQVYTLPPSRDELTKNQVSLTCLVKGFYPSDIAVEWESNGQPENNYKTTPPVLDSDGSFFLYSKLTVDKSRWQQGNVFSCSVMHEALHNHYTQKSLSLSPG

SEQ ID NO: 37 - protein, 231 aa, Artificial Sequence
  source: /note="Description of Artificial Sequence: Synthetic polypeptide"
EPKSCDKTHTSPPSPAPELLGGSSVFLFPPKPKDTLMISRTPEVTCVVVDVSHEDPEVKFNWYVDGVEVHNAKTKPREEQYNSTYRVVSVLTVLHQDWLNGKEYKCKVSNKALPAPIEKTISKAKGQPREPQVYTLPPSRDELTKNQVSLTCLVKGFYPSDIAVEWESNGQPENNYKTTPPVLDSDGSFFLYSKLTVDKSRWQQGNVFSCSVMHEALHNHYTQKSLSLSPG

SEQ ID NO: 38 - protein, 232 aa, Artificial Sequence
  source: /note="Description of Artificial Sequence: Synthetic polypeptide"
EPKSCDKTHTCPPCPAPELLGGPSVFLFPPKPKDTLMISRTPEVTCVVVDVSHEDPEVKFNWYVDGVEVHNAKTKPREEQYQSTYRVVSVLTVLHQDWLNGKEYKCKVSNKALPAPIEKTISKAKGQPREPQVYTLPPSRDELTKNQVSLTCLVKGFYPSDIAVEWESNGQPENNYKTTPPVLDSDGSFFLYSKLTVDKSRWQQGNVFSCSVMHEALHNHYTQKSLSLSPGK

SEQ ID NO: 39 - protein, 232 aa, Homo sapiens
EPKSCDKTHTCPPCPAPELLGGPSVFLFPPKPKDTLMISRTPEVTCVVVDVSHEDPEVKFNWYVDGVEVHNAKTKPREEQYNSTYRVVSVLTVLHQDWLNGKEYKCKVSNKALPAPIEKTISKAKGQPREPQVYTLPPSRDELTKNQVSLTCLVKGFYPSDIAVEWESNGQPENNYKTTPPVLDSDGSFFLYSKLTVDKSRWQQGNVFSCSVMHEALHNHYTQKSLSLSPGK

SEQ ID NO: 40 - protein, 232 aa, Artificial Sequence
  source: /note="Description of Artificial Sequence: Synthetic polypeptide"
EPKSCDKTHTCPPCPAPELLGGPSVFLFPPKPKDTLMISRTPEVTCVVVDVSHEDPEVKFNWYVDGVEVHNAKTKPREEQYGSTYRVVSVLTVLHQDWLNGKEYKCKVSNKALPAPIEKTISKAKGQPREPQVYTLPPSRDELTKNQVSLTCLVKGFYPSDIAVEWESNGQPENNYKTTPPVLDSDGSFFLYSKLTVDKSRWQQGNVFSCSVMHEALHNHYTQKSLSLSPGK

SEQ ID NO: 41 - protein, 232 aa, Artificial Sequence
  source: /note="Description of Artificial Sequence: Synthetic polypeptide"
EPKSSDKTHTSPPSPAPELLGGSSVFLFPPKPKDTLMISRTPEVTCVVVDVSHEDPEVKFNWYVDGVEVHNAKTKPREEQYNSTYRVVSVLTVLHQDWLNGKEYKCKVSNKALPAPIEKTISKAKGQPREPQVYTLPPSRDELTKNQVSLTCLVKGFYPSDIAVEWESNGQPENNYKTTPPVLDSDGSFFLYSKLTVDKSRWQQGNVFSCSVMHEALHNHYTQKSLSLSPGK

SEQ ID NO: 42 - protein, 229 aa, Artificial Sequence
  source: /note="Description of Artificial Sequence: Synthetic polypeptide"
ESKYGPPCPPCPAPEFAGGPSVFLFPPKPKDTLMISRTPEVTCVVVDVSQEDPEVQFNWYVDGVEVHNAKTKPREEQFNSTYRVVSVLTVLHQDWLNGKEYKCKVSNKGLPSSIEKTISKAKGQPREPQVYTLPPSQEEMTKNQVSLTCLVKGFYPSDIAVEWESNGQPENNYKTTPPVLDSDGSFFLYSRLTVDKSRWQEGNVFSCSVMHEALHNHYTQKSLSLSLGK

SEQ ID NO: 43 - protein, 232 aa, Artificial Sequence
  source: /note="Description of Artificial Sequence: Synthetic polypeptide"
EPKSCDKTHTCPPCPAPEAAGGPSVFLFPPKPKDTLMISRTPEVTCVVVDVSHEDPEVKFNWYVDGVEVHNAKTKPREEQYNSTYRVVSVLTVLHQDWLNGKEYKCKVSNKALPAPIEKTISKAKGQPREPQVYTLPPSRDELTKNQVSLTCLVKGFYPSDIAVEWESNGQPENNYKTTPPVLDSDGSFFLYSKLTVDKSRWQQGNVFSCSVMHEALHNHYTQKSLSLSPGK

SEQ ID NO: 44 - protein, 232 aa, Artificial Sequence
  source: /note="Description of Artificial Sequence: Synthetic polypeptide"
EPKSCDKTHTCPPCPAPELLGGSSVFLFPPKPKDTLMISRTPEVTCVVVDVSHEDPEVKFNWYVDGVEVHNAKTKPREEQYNSTYRVVSVLTVLHQDWLNGKEYKCKVSNKALPAPIEKTISKAKGQPREPQVYTLPPSRDELTKNQVSLTCLVKGFYPSDIAVEWESNGQPENNYKTTPPVLDSDGSFFLYSKLTVDKSRWQQGNVFSCSVMHEALHNHYTQKSLSLSPGK

SEQ ID NO: 45 - protein, 232 aa, Artificial Sequence
  source: /note="Description of Artificial Sequence: Synthetic polypeptide"
EPKSCDKTHTCPPCPAPELLGGSSVFLFPPKPKDTLMISRTPEVTCVVVDVSHEDPEVKFNWYVDGVEVHNAKTKPREEQYQSTYRVVSVLTVLHQDWLNGKEYKCKVSNKALPAPIEKTISKAKGQPREPQVYTLPPSRDELTKNQVSLTCLVKGFYPSDIAVEWESNGQPENNYKTTPPVLDSDGSFFLYSKLTVDKSRWQQGNVFSCSVMHEALHNHYTQKSLSLSPGK

SEQ ID NO: 46 - protein, 229 aa, Homo sapiens
ESKYGPPCPSCPAPEFLGGPSVFLFPPKPKDTLMISRTPEVTCVVVDVSQEDPEVQFNWYVDGVEVHNAKTKPREEQFNSTYRVVSVLTVLHQDWLNGKEYKCKVSNKGLPSSIEKTISKAKGQPREPQVYTLPPSQEEMTKNQVSLTCLVKGFYPSDIAVEWESNGQPENNYKTTPPVLDSDGSFFLYSRLTVDKSRWQEGNVFSCSVMHEALHNHYTQKSLSLSLGK

SEQ ID NO: 47 - protein, 228 aa, Homo sapiens
ERKCCVECPPCPAPPVAGPSVFLFPPKPKDTLMISRTPEVTCVVVDVSHEDPEVQFNWYVDGMEVHNAKTKPREEQFNSTFRVVSVLTVVHQDWLNGKEYKCKVSNKGLPAPIEKTISKTKGQPREPQVYTLPPSREEMTKNQVSLTCLVKGFYPSDIAVEWESNGQPENNYKTTPPMLDSDGSFFLYSKLTVDKSRWQQGNVFSCSVMHEALHNHYTQKSLSLSPGK

SEQ ID NO: 48 - protein, 232 aa, Artificial Sequence
  source: /note="Description of Artificial Sequence: Synthetic polypeptide"
EPKSSDKTHTSPPSPAPELLGGSSVFLFPPKPKDTLMISRTPEVTCVVVDVSHEDPEVKFNWYVDGVEVHNAKTKPREEQYQSTYRVVSVLTVLHQDWLNGKEYKCKVSNKALPAPIEKTISKAKGQPREPQVYTLPPSRDELTKNQVSLTCLVKGFYPSDIAVEWESNGQPENNYKTTPPVLDSDGSFFLYSKLTVDKSRWQQGNVFSCSVMHEALHNHYTQKSLSLSPGK

SEQ ID NO: 49 - protein, 232 aa, Artificial Sequence
  source: /note="Description of Artificial Sequence: Synthetic polypeptide"
EPKSSDKTHTSPPSPAPELLGGPSVFLFPPKPKDTLMISRTPEVTCVVVDVSHEDPEVKFNWYVDGVEVHNAKTKPREEQYNSTYRVVSVLTVLHQDWLNGKEYKCKVSNKALPAPIEKTISKAKGQPREPQVYTLPPSRDELTKNQVSLTCLVKGFYPSDIAVEWESNGQPENNYKTTPPVLDSDGSFFLYSKLTVDKSRWQQGNVFSCSVMHEALHNHYTQKSLSLSPGK

SEQ ID NO: 50 - protein, 232 aa, Artificial Sequence
  source: /note="Description of Artificial Sequence: Synthetic polypeptide"
EPKSSDKTHTCPPCPAPELLGGPSVFLFPPKPKDTLMISRTPEVTCVVVDVSHEDPEVKFNWYVDGVEVHNAKTKPREEQYQSTYRVVSVLTVLHQDWLNGKEYKCKVSNKALPAPIEKTISKAKGQPREPQVYTLPPSRDELTKNQVSLTCLVKGFYPSDIAVEWESNGQPENNYKTTPPVLDSDGSFFLYSKLTVDKSRWQQGNVFSCSVMHEALHNHYTQKSLSLSPGK

SEQ ID NO: 51 - protein, 225 aa, Artificial Sequence
  source: /note="Description of Artificial Sequence: Synthetic polypeptide"
THTSPPSPAPELLGGSSVFLFPPKPKDTLMISRTPEVTCVVVDVSHEDPEVKFNWYVDGVEVHNAKTKPREEQYNSTYRVVSVLTVLHQDWLNGKEYKCKVSNKALPAPIEKTISKAKGQPREPQVYTLPPSRDELTKNQVSLTCLVKGFYPSDIAVEWESNGQPENNYKTTPPVLDSDGSFFLYSKLTVDKSRWQQGNVFSCSVMHEALHNHYTQKSLSLSPGK

SEQ ID NO: 52 - protein, 225 aa, Artificial Sequence
  source: /note="Description of Artificial Sequence: Synthetic polypeptide"
THTSPPSPAPELLGGPSVFLFPPKPKDTLMISRTPEVTCVVVDVSHEDPEVKFNWYVDGVEVHNAKTKPREEQYNSTYRVVSVLTVLHQDWLNGKEYKCKVSNKALPAPIEKTISKAKGQPREPQVYTLPPSRDELTKNQVSLTCLVKGFYPSDIAVEWESNGQPENNYKTTPPVLDSDGSFFLYSKLTVDKSRWQQGNVFSCSVMHEALHNHYTQKSLSLSPGK

SEQ ID NO: 53 - protein, 225 aa, Artificial Sequence
  source: /note="Description of Artificial Sequence: Synthetic polypeptide"
THTSPPSPAPELLGGSSVFLFPPKPKDTLMISRTPEVTCVVVDVSHEDPEVKFNWYVDGVEVHNAKTKPREEQYQSTYRVVSVLTVLHQDWLNGKEYKCKVSNKALPAPIEKTISKAKGQPREPQVYTLPPSRDELTKNQVSLTCLVKGFYPSDIAVEWESNGQPENNYKTTPPVLDSDGSFFLYSKLTVDKSRWQQGNVFSCSVMHEALHNHYTQKSLSLSPGK

SEQ ID NO: 54 - protein, 225 aa, Artificial Sequence
  source: /note="Description of Artificial Sequence: Synthetic polypeptide"
THTSPPSPAPELLGGPSVFLFPPKPKDTLMISRTPEVTCVVVDVSHEDPEVKFNWYVDGVEVHNAKTKPREEQYQSTYRVVSVLTVLHQDWLNGKEYKCKVSNKALPAPIEKTISKAKGQPREPQVYTLPPSRDELTKNQVSLTCLVKGFYPSDIAVEWESNGQPENNYKTTPPVLDSDGSFFLYSKLTVDKSRWQQGNVFSCSVMHEALHNHYTQKSLSLSPGK

SEQ ID NO: 55 - protein, 225 aa, Artificial Sequence
  source: /note="Description of Artificial Sequence: Synthetic polypeptide"
THTCPPCPAPELLGGPSVFLFPPKPKDTLMISRTPEVTCVVVDVSHEDPEVKFNWYVDGVEVHNAKTKPREEQYQSTYRVVSVLTVLHQDWLNGKEYKCKVSNKALPAPIEKTISKAKGQPREPQVYTLPPSRDELTKNQVSLTCLVKGFYPSDIAVEWESNGQPENNYKTTPPVLDSDGSFFLYSKLTVDKSRWQQGNVFSCSVMHEALHNHYTQKSLSLSPGK

SEQ ID NO: 56 - protein, 232 aa, Artificial Sequence
  source: /note="Description of Artificial Sequence: Synthetic polypeptide"
EPKSCDKTHTSPPSPAPELLGGSSVFLFPPKPKDTLMISRTPEVTCVVVDVSHEDPEVKFNWYVDGVEVHNAKTKPREEQYNSTYRVVSVLTVLHQDWLNGKEYKCKVSNKALPAPIEKTISKAKGQPREPQVYTLPPSRDELTKNQVSLTCLVKGFYPSDIAVEWESNGQPENNYKTTPPVLDSDGSFFLYSKLTVDKSRWQQGNVFSCSVMHEALHNHYTQKSLSLSPGK

SEQ ID NO: 57 - protein, 5 aa, Artificial Sequence
  source: /note="Description of Artificial Sequence: Synthetic peptide"
SYYMY

SEQ ID NO: 58 - protein, 17 aa, Artificial Sequence
  source: /note="Description of Artificial Sequence: Synthetic peptide"
EINPSNGDTNFNEKFKS

SEQ ID NO: 59 - protein, 9 aa, Artificial Sequence
  source: /note="Description of Artificial Sequence: Synthetic peptide"
SDGRNDMDS

SEQ ID NO: 60 - protein, 18 aa, Artificial Sequence
  source: /note="Description of Artificial Sequence: Synthetic peptide"
ISCRASQRVSSSTYSYMH

SEQ ID NO: 61 - protein, 7 aa, Artificial Sequence
  source: /note="Description of Artificial Sequence: Synthetic peptide"
YASNLES

SEQ ID NO: 62 - protein, 9 aa, Artificial Sequence
  source: /note="Description of Artificial Sequence: Synthetic peptide"
QHSWEIPPT

SEQ ID NO: 63 - protein, 134 aa, Artificial Sequence
  source: /note="Description of Artificial Sequence: Synthetic polypeptide"
MPLLLLLPLLWAGALAQVQLVQSGAEVVKPGASVKLSCKASGYIFTSYYMYWVKQAPGQGLEWIGEINPSNGDTNFNEKFKSKATLTVDKSASTAYMELSSLRSEDTAVYYCTRSDGRNDMDSWGQGTLVTVSS

SEQ ID NO: 64 - protein, 118 aa, Artificial Sequence
  source: /note="Description of Artificial Sequence: Synthetic polypeptide"
QVQLVQSGAEVVKPGASVKLSCKASGYIFTSYYMYWVKQAPGQGLEWIGEINPSNGDTNFNEKFKSKATLTVDKSASTAYMELSSLRSEDTAVYYCTRSDGRNDMDSWGQGTLVTVSS

SEQ ID NO: 65 - protein, 131 aa, Artificial Sequence
  source: /note="Description of Artificial Sequence: Synthetic polypeptide"
MRLPAQLLGLLMLWVSGSSGDIVLTQSPATLSVSPGERATISCRASQRVSSSTYSYMHWYQQKPGQPPKLLIKYASNLESGVPARFSGSGSGTDFTLTISSVEPEDFATYYCQHSWEIPPTFGGGTKLEIK

SEQ ID NO: 66 - protein, 111 aa, Artificial Sequence
  source: /note="Description of Artificial Sequence: Synthetic polypeptide"
DIVLTQSPATLSVSPGERATISCRASQRVSSSTYSYMHWYQQKPGQPPKLLIKYASNLESGVPARFSGSGSGTDFTLTISSVEPEDFATYYCQHSWEIPPTFGGGTKLEIK

SEQ ID NO: 67 - protein, 98 aa, Artificial Sequence
  source: /note="Description of Artificial Sequence: Synthetic polypeptide"
ASTKGPSVFPLAPSSKSTSGGTAALGCLVKDYFPEPVTVSWNSGALTSGVHTFPAVLQSSGLYSLSSVVTVPSSSLGTQTYICNVNHKPSNTKVDKKV

SEQ ID NO: 68 - protein, 110 aa, Artificial Sequence
  source: /note="Description of Artificial Sequence: Synthetic polypeptide"
APELLGGPSVFLFPPKPKDTLMISRTPEVTCVVVDVSHEDPEVKFNWYVDGVEVHNAKTKPREEQYNSTYRVVSVLTVLHQDWLNGKEYKCKVSNKALPAPIEKTISKAK

SEQ ID NO: 69 - protein, 107 aa, Artificial Sequence
  source: /note="Description of Artificial Sequence: Synthetic polypeptide"
GQPREPQVYTLPPSRDELTKNQVSLTCLVKGFYPSDIAVEWESNGQPENNYKTTPPVLDSDGSFFLYSKLTVDKSRWQQGNVFSCSVMHEALHNHYTQKSLSLSPGK

SEQ ID NO: 70 - protein, 98 aa, Artificial Sequence
  source: /note="Description of Artificial Sequence: Synthetic polypeptide"
ASTKGPSVFPLAPCSRSTSESTAALGCLVKDYFPEPVTVSWNSGALTSGVHTFPAVLQSSGLYSLSSVVTVPSSNFGTQTYTCNVDHKPSNTKVDKTV

SEQ ID NO: 71 - protein, 109 aa, Artificial Sequence
  source: /note="Description of Artificial Sequence: Synthetic polypeptide"
APPVAGPSVFLFPPKPKDTLMISRTPEVTCVVVDVSHEDPEVQFNWYVDGVEVHNAKTKPREEQFNSTFRVVSVLTVVHQDWLNGKEYKCKVSNKGLPAPIEKTISKTK

SEQ ID NO: 72 - protein, 107 aa, Artificial Sequence
  source: /note="Description of Artificial Sequence: Synthetic polypeptide"
GQPREPQVYTLPPSREEMTKNQVSLTCLVKGFYPSDISVEWESNGQPENNYKTTPPMLDSDGSFFLYSKLTVDKSRWQQGNVFSCSVMHEALHNHYTQKSLSLSPGK

SEQ ID NO: 73 - protein, 98 aa, Artificial Sequence
  source: /note="Description of Artificial Sequence: Synthetic polypeptide"
ASTKGPSVFPLAPCSRSTSESTAALGCLVKDYFPEPVTVSWNSGALTSGVHTFPAVLQSSGLYSLSSVVTVPSSSLGTKTYTCNVDHKPSNTKVDKRV

SEQ ID NO: 74 - protein, 110 aa, Artificial Sequence
  source: /note="Description of Artificial Sequence: Synthetic polypeptide"
APEFLGGPSVFLFPPKPKDTLMISRTPEVTCVVVDVSQEDPEVQFNWYVDGVEVHNAKTKPREEQFNSTYRVVSVLTVLHQDWLNGKEYKCKVSNKGLPSSIEKTISKAK

SEQ ID NO: 75 - protein, 107 aa, Artificial Sequence
  source: /note="Description of Artificial Sequence: Synthetic polypeptide"
GQPREPQVYTLPPSQEEMTKNQVSLTCLVKGFYPSDIAVEWESNGQPENNYKTTPPVLDSDGSFFLYSRLTVDKSRWQEGNVFSCSVMHEALHNHYTQKSLSLSLGK

SEQ ID NO: 76 - protein, 15 aa, Homo sapiens
EPKSCDKTHTCPPCP

SEQ ID NO: 77 - protein, 15 aa, Artificial Sequence
  source: /note="Description of Artificial Sequence: Synthetic peptide"
EPKSCDKTHTCPPSP

SEQ ID NO: 78 - protein, 15 aa, Artificial Sequence
  source: /note="Description of Artificial Sequence: Synthetic peptide"
EPKSCDKTHTSPPCP

SEQ ID NO: 79 - protein, 15 aa, Artificial Sequence
  source: /note="Description of Artificial Sequence: Synthetic peptide"
EPKSSDKTHTCPPCP

SEQ ID NO: 80 - protein, 15 aa, Artificial Sequence
  source: /note="Description of Artificial Sequence: Synthetic peptide"
EPKSSDKTHTCPPSP

SEQ ID NO: 81 - protein, 15 aa, Artificial Sequence
  source: /note="Description of Artificial Sequence: Synthetic peptide"
EPKSCDKTHTSPPSP

SEQ ID NO: 82 - protein, 15 aa, Artificial Sequence
  source: /note="Description of Artificial Sequence: Synthetic peptide"
EPKSSDKTHTSPPCP

SEQ ID NO: 83 - protein, 15 aa, Artificial Sequence
  source: /note="Description of Artificial Sequence: Synthetic peptide"
EPKSSDKTHTSPPSP

SEQ ID NO: 84 - protein, 8 aa, Artificial Sequence
  source: /note="Description of Artificial Sequence: Synthetic peptide"
THTSPPSP

SEQ ID NO: 85 - protein, 8 aa, Artificial Sequence
  source: /note="Description of Artificial Sequence: Synthetic peptide"
THTCPPCP

SEQ ID NO: 86 - protein, 8 aa, Artificial Sequence
  source: /note="Description of Artificial Sequence: Synthetic peptide"
THTSPPCP

SEQ ID NO: 87 - protein, 8 aa, Artificial Sequence
  source: /note="Description of Artificial Sequence: Synthetic peptide"
THTCPPSP

SEQ ID NO: 88 - protein, 12 aa, Artificial Sequence
  source: /note="Description of Artificial Sequence: Synthetic peptide"
ESKYGPPCPPCP

SEQ ID NO: 89 - protein, 12 aa, Homo sapiens
ESKYGPPCPSCP

SEQ ID NO: 90 - protein, 12 aa, Homo sapiens
ERKCCVECPPCP

SEQ ID NO: 91 - protein, 329 aa, Artificial Sequence
  source: /note="Description of Artificial Sequence: Synthetic polypeptide"
ASTKGPSVFPLAPSSKSTSGGTAALGCLVKDYFPEPVTVSWNSGALTSGVHTFPAVLQSSGLYSLSSVVTVPSSSLGTQTYICNVNHKPSNTKVDKKVEPKSCDKTHTCPPCPAPELLGGPSVFLFPPKPKDTLMISRTPEVTCVVVDVSHEDPEVKFNWYVDGVEVHNAKTKPREEQYQSTYRVVSVLTVLHQDWLNGKEYKCKVSNKALPAPIEKTISKAKGQPREPQVYTLPPSRDELTKNQVSLTCLVKGFYPSDIAVEWESNGQPENNYKTTPPVLDSDGSFFLYSKLTVDKSRWQQGNVFSCSVMHEALHNHYTQKSLSLSPG

SEQ ID NO: 92 - protein, 329 aa, Homo sapiens
ASTKGPSVFPLAPSSKSTSGGTAALGCLVKDYFPEPVTVSWNSGALTSGVHTFPAVLQSSGLYSLSSVVTVPSSSLGTQTYICNVNHKPSNTKVDKKVEPKSCDKTHTCPPCPAPELLGGPSVFLFPPKPKDTLMISRTPEVTCVVVDVSHEDPEVKFNWYVDGVEVHNAKTKPREEQYNSTYRVVSVLTVLHQDWLNGKEYKCKVSNKALPAPIEKTISKAKGQPREPQVYTLPPSRDELTKNQVSLTCLVKGFYPSDIAVEWESNGQPENNYKTTPPVLDSDGSFFLYSKLTVDKSRWQQGNVFSCSVMHEALHNHYTQKSLSLSPG

SEQ ID NO: 93 - protein, 329 aa, Artificial Sequence
  source: /note="Description of Artificial Sequence: Synthetic polypeptide"
ASTKGPSVFPLAPSSKSTSGGTAALGCLVKDYFPEPVTVSWNSGALTSGVHTFPAVLQSSGLYSLSSVVTVPSSSLGTQTYICNVNHKPSNTKVDKKVEPKSCDKTHTCPPCPAPELLGGPSVFLFPPKPKDTLMISRTPEVTCVVVDVSHEDPEVKFNWYVDGVEVHNAKTKPREEQYGSTYRVVSVLTVLHQDWLNGKEYKCKVSNKALPAPIEKTISKAKGQPREPQVYTLPPSRDELTKNQVSLTCLVKGFYPSDIAVEWESNGQPENNYKTTPPVLDSDGSFFLYSKLTVDKSRWQQGNVFSCSVMHEALHNHYTQKSLSLSPG

SEQ ID NO: 94 - protein, 329 aa, Artificial Sequence
  source: /note="Description of Artificial Sequence: Synthetic polypeptide"
ASTKGPSVFPLAPSSKSTSGGTAALGCLVKDYFPEPVTVSWNSGALTSGVHTFPAVLQSSGLYSLSSVVTVPSSSLGTQTYICNVNHKPSNTKVDKKVEPKSSDKTHTSPPSPAPELLGGSSVFLFPPKPKDTLMISRTPEVTCVVVDVSHEDPEVKFNWYVDGVEVHNAKTKPREEQYNSTYRVVSVLTVLHQDWLNGKEYKCKVSNKALPAPIEKTISKAKGQPREPQVYTLPPSRDELTKNQVSLTCLVKGFYPSDIAVEWESNGQPENNYKTTPPVLDSDGSFFLYSKLTVDKSRWQQGNVFSCSVMHEALHNHYTQKSLSLSPG

SEQ ID NO: 95 - protein, 326 aa, Artificial Sequence
  source: /note="Description of Artificial Sequence: Synthetic polypeptide"
ASTKGPSVFPLAPCSRSTSESTAALGCLVKDYFPEPVTVSWNSGALTSGVHTFPAVLQSSGLYSLSSVVTVPSSSLGTKTYTCNVDHKPSNTKVDKRVESKYGPPCPPCPAPEFAGGPSVFLFPPKPKDTLMISRTPEVTCVVVDVSQEDPEVQFNWYVDGVEVHNAKTKPREEQFNSTYRVVSVLTVLHQDWLNGKEYKCKVSNKGLPSSIEKTISKAKGQPREPQVYTLPPSQEEMTKNQVSLTCLVKGFYPSDIAVEWESNGQPENNYKTTPPVLDSDGSFFLYSRLTVDKSRWQEGNVFSCSVMHEALHNHYTQKSLSLSLG

SEQ ID NO: 96 - protein, 326 aa, Homo sapiens
ASTKGPSVFPLAPCSRSTSESTAALGCLVKDYFPEPVTVSWNSGALTSGVHTFPAVLQSSGLYSLSSVVTVPSSSLGTKTYTCNVDHKPSNTKVDKRVESKYGPPCPSCPAPEFLGGPSVFLFPPKPKDTLMISRTPEVTCVVVDVSQEDPEVQFNWYVDGVEVHNAKTKPREEQFNSTYRVVSVLTVLHQDWLNGKEYKCKVSNKGLPSSIEKTISKAKGQPREPQVYTLPPSQEEMTKNQVSLTCLVKGFYPSDIAVEWESNGQPENNYKTTPPVLDSDGSFFLYSRLTVDKSRWQEGNVFSCSVMHEALHNHYTQKSLSLSLG

SEQ ID NO: 97 - protein, 325 aa, Homo sapiens
ASTKGPSVFPLAPCSRSTSESTAALGCLVKDYFPEPVTVSWNSGALTSGVHTFPAVLQSSGLYSLSSVVTVTSSNFGTQTYTCNVDHKPSNTKVDKTVERKCCVECPPCPAPPVAGPSVFLFPPKPKDTLMISRTPEVTCVVVDVSHEDPEVQFNWYVDGMEVHNAKTKPREEQFNSTFRVVSVLTVVHQDWLNGKEYKCKVSNKGLPAPIEKTISKTKGQPREPQVYTLPPSREEMTKNQVSLTCLVKGFYPSDIAVEWESNGQPENNYKTTPPMLDSDGSFFLYSKLTVDKSRWQQGNVFSCSVMHEALHNHYTQKSLSLSPG

SEQ ID NO: 98 - protein, 322 aa, Artificial Sequence
  source: /note="Description of Artificial Sequence: Synthetic polypeptide"
ASTKGPSVFPLAPSSKSTSGGTAALGCLVKDYFPEPVTVSWNSGALTSGVHTFPAVLQSSGLYSLSSVVTVPSSSLGTQTYICNVNHKPSNTKVDKKVTHTSPPSPAPELLGGSSVFLFPPKPKDTLMISRTPEVTCVVVDVSHEDPEVKFNWYVDGVEVHNAKTKPREEQYNSTYRVVSVLTVLHQDWLNGKEYKCKVSNKALPAPIEKTISKAKGQPREPQVYTLPPSRDELTKNQVSLTCLVKGFYPSDIAVEWESNGQPENNYKTTPPVLDSDGSFFLYSKLTVDKSRWQQGNVFSCSVMHEALHNHYTQKSLSLSPG

SEQ ID NO: 99 - protein, 329 aa, Artificial Sequence
  source: /note="Description of Artificial Sequence: Synthetic polypeptide"
ASTKGPSVFPLAPSSKSTSGGTAALGCLVKDYFPEPVTVSWNSGALTSGVHTFPAVLQSSGLYSLSSVVTVPSSSLGTQTYICNVNHKPSNTKVDKKVEPKSSDKTHTSPPSPAPELLGGSSVFLFPPKPKDTLMISRTPEVTCVVVDVSHEDPEVKFNWYVDGVEVHNAKTKPREEQYQSTYRVVSVLTVLHQDWLNGKEYKCKVSNKALPAPIEKTISKAKGQPREPQVYTLPPSRDELTKNQVSLTCLVKGFYPSDIAVEWESNGQPENNYKTTPPVLDSDGSFFLYSKLTVDKSRWQQGNVFSCSVMHEALHNHYTQKSLSLSPG

SEQ ID NO: 100 - protein, 322 aa, Artificial Sequence
  source: /note="Description of Artificial Sequence: Synthetic polypeptide"
ASTKGPSVFPLAPSSKSTSGGTAALGCLVKDYFPEPVTVSWNSGALTSGVHTFPAVLQSSGLYSLSSVVTVPSSSLGTQTYICNVNHKPSNTKVDKKVTHTSPPSPAPELLGGSSVFLFPPKPKDTLMISRTPEVTCVVVDVSHEDPEVKFNWYVDGVEVHNAKTKPREEQYQSTYRVVSVLTVLHQDWLNGKEYKCKVSNKALPAPIEKTISKAKGQPREPQVYTLPPSRDELTKNQVSLTCLVKGFYPSDIAVEWESNGQPENNYKTTPPVLDSDGSFFLYSKLTVDKSRWQQGNVFSCSVMHEALHNHYTQKSLSLSPG

SEQ ID NO: 101 - protein, 329 aa, Artificial Sequence
  source: /note="Description of Artificial Sequence: Synthetic polypeptide"
ASTKGPSVFPLAPSSKSTSGGTAALGCLVKDYFPEPVTVSWNSGALTSGVHTFPAVLQSSGLYSLSSVVTVPSSSLGTQTYICNVNHKPSNTKVDKKVEPKSSDKTHTSPPSPAPELLGGSSVFLFPPKPKDTLMISRTPEVTCVVVDVSHEDPEVKFNWYVDGVEVHNAKTKPREEQYGSTYRVVSVLTVLHQDWLNGKEYKCKVSNKALPAPIEKTISKAKGQPREPQVYTLPPSRDELTKNQVSLTCLVKGFYPSDIAVEWESNGQPENNYKTTPPVLDSDGSFFLYSKLTVDKSRWQQGNVFSCSVMHEALHNHYTQKSLSLSPG

SEQ ID NO: 102 - protein, 322 aa, Artificial Sequence
  source: /note="Description of Artificial Sequence: Synthetic polypeptide"
ASTKGPSVFPLAPSSKSTSGGTAALGCLVKDYFPEPVTVSWNSGALTSGVHTFPAVLQSSGLYSLSSVVTVPSSSLGTQTYICNVNHKPSNTKVDKKVTHTSPPSPAPELLGGSSVFLFPPKPKDTLMISRTPEVTCVVVDVSHEDPEVKFNWYVDGVEVHNAKTKPREEQYGSTYRVVSVLTVLHQDWLNGKEYKCKVSNKALPAPIEKTISKAKGQPREPQVYTLPPSRDELTKNQVSLTCLVKGFYPSDIAVEWESNGQPENNYKTTPPVLDSDGSFFLYSKLTVDKSRWQQGNVFSCSVMHEALHNHYTQKSLSLSPG

SEQ ID NO: 103 - protein, 329 aa, Artificial Sequence
  source: /note="Description of Artificial Sequence: Synthetic polypeptide"
ASTKGPSVFPLAPSSKSTSGGTAALGCLVKDYFPEPVTVSWNSGALTSGVHTFPAVLQSSGLYSLSSVVTVPSSSLGTQTYICNVNHKPSNTKVDKKVEPKSCDKTHTCPPCPAPEAAGGPSVFLFPPKPKDTLMISRTPEVTCVVVDVSHEDPEVKFNWYVDGVEVHNAKTKPREEQYNSTYRVVSVLTVLHQDWLNGKEYKCKVSNKALPAPIEKTISKAKGQPREPQVYTLPPSRDELTKNQVSLTCLVKGFYPSDIAVEWESNGQPENNYKTTPPVLDSDGSFFLYSKLTVDKSRWQQGNVFSCSVMHEALHNHYTQKSLSLSPG

SEQ ID NO: 104 - protein, 329 aa, Artificial Sequence
  source: /note="Description of Artificial Sequence: Synthetic polypeptide"
ASTKGPSVFPLAPSSKSTSGGTAALGCLVKDYFPEPVTVSWNSGALTSGVHTFPAVLQSSGLYSLSSVVTVPSSSLGTQTYICNVNHKPSNTKVDKKVEPKSCDKTHTSPPSPAPELLGGSSVFLFPPKPKDTLMISRTPEVTCVVVDVSHEDPEVKFNWYVDGVEVHNAKTKPREEQYNSTYRVVSVLTVLHQDWLNGKEYKCKVSNKALPAPIEKTISKAKGQPREPQVYTLPPSRDELTKNQVSLTCLVKGFYPSDIAVEWESNGQPENNYKTTPPVLDSDGSFFLYSKLTVDKSRWQQGNVFSCSVMHEALHNHYTQKSLSLSPG

SEQ ID NO: 105 - protein, 330 aa, Artificial Sequence
  source: /note="Description of Artificial Sequence: Synthetic polypeptide"
ASTKGPSVFPLAPSSKSTSGGTAALGCLVKDYFPEPVTVSWNSGALTSGVHTFPAVLQSSGLYSLSSVVTVPSSSLGTQTYICNVNHKPSNTKVDKKVEPKSCDKTHTCPPCPAPELLGGPSVFLFPPKPKDTLMISRTPEVTCVVVDVSHEDPEVKFNWYVDGVEVHNAKTKPREEQYQSTYRVVSVLTVLHQDWLNGKEYKCKVSNKALPAPIEKTISKAKGQPREPQVYTLPPSRDELTKNQVSLTCLVKGFYPSDIAVEWESNGQPENNYKTTPPVLDSDGSFFLYSKLTVDKSRWQQGNVFSCSVMHEALHNHYTQKSLSLSPGK

SEQ ID NO: 106 - protein, 330 aa, Homo sapiens [sequence omitted]

SEQ ID NO: 107 - protein, 330 aa, Artificial Sequence
  source: /note="Description of Artificial Sequence: Synthetic polypeptide"
ASTKGPSVFPLAPSSKSTSGGTAALGCLVKDYFPEPVTVSWNSGALTSGVHTFPAVLQSSGLYSLSSVVTVPSSSLGTQTYICNVNHKPSNTKVDKKVEPKSCDKTHTCPPCPAPELLGGPSVFLFPPKPKDTLMISRTPEVTCVVVDVSHEDPEVKFNWYVDGVEVHNAKTKPREEQYGSTYRVVSVLTVLHQDWLNGKEYKCKVSNKALPAPIEKTISKAKGQPREPQVYTLPPSRDELTKNQVSLTCLVKGFYPSDIAVEWESNGQPENNYKTTPPVLDSDGSFFLYSKLTVDKSRWQQGNVFSCSVMHEALHNHYTQKSLSLSPGK

SEQ ID NO: 108 - protein, 330 aa, Artificial Sequence
  source: /note="Description of Artificial Sequence: Synthetic polypeptide"
ASTKGPSVFPLAPSSKSTSGGTAALGCLVKDYFPEPVTVSWNSGALTSGVHTFPAVLQSSGLYSLSSVVTVPSSSLGTQTYICNVNHKPSNTKVDKKVEPKSSDKTHTSPPSPAPELLGGSSVFLFPPKPKDTLMISRTPEVTCVVVDVSHEDPEVKFNWYVDGVEVHNAKTKPREEQYNSTYRVVSVLTVLHQDWLNGKEYKCKVSNKALPAPIEKTISKAKGQPREPQVYTLPPSRDELTKNQVSLTCLVKGFYPSDIAVEWESNGQPENNYKTTPPVLDSDGSFFLYSKLTVDKSRWQQGNVFSCSVMHEALHNHYTQKSLSLSPGK

SEQ ID NO: 109 - protein, 327 aa, Artificial Sequence
  source: /note="Description of Artificial Sequence: Synthetic polypeptide"
ASTKGPSVFPLAPCSRSTSESTAALGCLVKDYFPEPVTVSWNSGALTSGVHTFPAVLQSSGLYSLSSVVTVPSSSLGTKTYTCNVDHKPSNTKVDKRVESKYGPPCPPCPAPEFAGGPSVFLFPPKPKDTLMISRTPEVTCVVVDVSQEDPEVQFNWYVDGVEVHNAKTKPREEQFNSTYRVVSVLTVLHQDWLNGKEYKCKVSNKGLPSSIEKTISKAKGQPREPQVYTLPPSQEEMTKNQVSLTCLVKGFYPSDIAVEWESNGQPENNYKTTPPVLDSDGSFFLYSRLTVDKSRWQEGNVFSCSVMHEALHNHYTQKSLSLSLGK

SEQ ID NO: 110 - protein, 327 aa, Homo sapiens
ASTKGPSVFPLAPCSRSTSESTAALGCLVKDYFPEPVTVSWNSGALTSGVHTFPAVLQSSGLYSLSSVVTVPSSSLGTKTYTCNVDHKPSNTKVDKRVESKYGPPCPSCPAPEFLGGPSVFLFPPKPKDTLMISRTPEVTCVVVDVSQEDPEVQFNWYVDGVEVHNAKTKPREEQFNSTYRVVSVLTVLHQDWLNGKEYKCKVSNKGLPSSIEKTISKAKGQPREPQVYTLPPSQEEMTKNQVSLTCLVKGFYPSDIAVEWESNGQPENNYKTTPPVLDSDGSFFLYSRLTVDKSRWQEGNVFSCSVMHEALHNHYTQKSLSLSLGK

SEQ ID NO: 111 - protein, 326 aa, Homo sapiens
ASTKGPSVFPLAPCSRSTSESTAALGCLVKDYFPEPVTVSWNSGALTSGVHTFPAVLQSSGLYSLSSVVTVTSSNFGTQTYTCNVDHKPSNTKVDKTVERKCCVECPPCPAPPVAGPSVFLFPPKPKDTLMISRTPEVTCVVVDVSHEDPEVQFNWYVDGMEVHNAKTKPREEQFNSTFRVVSVLTVVHQDWLNGKEYKCKVSNKGLPAPIEKTISKTKGQPREPQVYTLPPSREEMTKNQVSLTCLVKGFYPSDIAVEWESNGQPENNYKTTPPMLDSDGSFFLYSKLTVDKSRWQQGNVFSCSVMHEALHNHYTQKSLSLSPGK

SEQ ID NO: 112 - protein, 323 aa, Artificial Sequence
  source: /note="Description of Artificial Sequence: Synthetic polypeptide"
ASTKGPSVFPLAPSSKSTSGGTAALGCLVKDYFPEPVTVSWNSGALTSGVHTFPAVLQSSGLYSLSSVVTVPSSSLGTQTYICNVNHKPSNTKVDKKVTHTSPPSPAPELLGGSSVFLFPPKPKDTLMISRTPEVTCVVVDVSHEDPEVKFNWYVDGVEVHNAKTKPREEQYNSTYRVVSVLTVLHQDWLNGKEYKCKVSNKALPAPIEKTISKAKGQPREPQVYTLPPSRDELTKNQVSLTCLVKGFYPSDIAVEWESNGQPENNYKTTPPVLDSDGSFFLYSKLTVDKSRWQQGNVFSCSVMHEALHNHYTQKSLSLSPGK

SEQ ID NO: 113 - protein, 330 aa, Artificial Sequence
  source: /note="Description of Artificial Sequence: Synthetic polypeptide"
ASTKGPSVFPLAPSSKSTSGGTAALGCLVKDYFPEPVTVSWNSGALTSGVHTFPAVLQSSGLYSLSSVVTVPSSSLGTQTYICNVNHKPSNTKVDKKVEPKSSDKTHTSPPSPAPELLGGSSVFLFPPKPKDTLMISRTPEVTCVVVDVSHEDPEVKFNWYVDGVEVHNAKTKPREEQYQSTYRVVSVLTVLHQDWLNGKEYKCKVSNKALPAPIEKTISKAKGQPREPQVYTLPPSRDELTKNQVSLTCLVKGFYPSDIAVEWESNGQPENNYKTTPPVLDSDGSFFLYSKLTVDKSRWQQGNVFSCSVMHEALHNHYTQKSLSLSPGK

SEQ ID NO: 114 - protein, 322 aa, Artificial Sequence; identical to SEQ ID NO: 100
  source: /note="Description of Artificial Sequence: Synthetic polypeptide"

SEQ ID NO: 115 - protein, 330 aa, Artificial Sequence
  source: /note="Description of Artificial Sequence: Synthetic polypeptide"
ASTKGPSVFPLAPSSKSTSGGTAALGCLVKDYFPEPVTVSWNSGALTSGVHTFPAVLQSSGLYSLSSVVTVPSSSLGTQTYICNVNHKPSNTKVDKKVEPKSSDKTHTSPPSPAPELLGGSSVFLFPPKPKDTLMISRTPEVTCVVVDVSHEDPEVKFNWYVDGVEVHNAKTKPREEQYGSTYRVVSVLTVLHQDWLNGKEYKCKVSNKALPAPIEKTISKAKGQPREPQVYTLPPSRDELTKNQVSLTCLVKGFYPSDIAVEWESNGQPENNYKTTPPVLDSDGSFFLYSKLTVDKSRWQQGNVFSCSVMHEALHNHYTQKSLSLSPGK

SEQ ID NO: 116 - protein, 323 aa, Artificial Sequence
  source: /note="Description of Artificial Sequence: Synthetic polypeptide"
ASTKGPSVFPLAPSSKSTSGGTAALGCLVKDYFPEPVTVSWNSGALTSGVHTFPAVLQSSGLYSLSSVVTVPSSSLGTQTYICNVNHKPSNTKVDKKVTHTSPPSPAPELLGGSSVFLFPPKPKDTLMISRTPEVTCVVVDVSHEDPEVKFNWYVDGVEVHNAKTKPREEQYGSTYRVVSVLTVLHQDWLNGKEYKCKVSNKALPAPIEKTISKAKGQPREPQVYTLPPSRDELTKNQVSLTCLVKGFYPSDIAVEWESNGQPENNYKTTPPVLDSDGSFFLYSKLTVDKSRWQQGNVFSCSVMHEALHNHYTQKSLSLSPGK

SEQ ID NO: 117 - protein, 330 aa, Artificial Sequence
  source: /note="Description of Artificial Sequence: Synthetic polypeptide"
ASTKGPSVFPLAPSSKSTSGGTAALGCLVKDYFPEPVTVSWNSGALTSGVHTFPAVLQSSGLYSLSSVVTVPSSSLGTQTYICNVNHKPSNTKVDKKVEPKSCDKTHTCPPCPAPEAAGGPSVFLFPPKPKDTLMISRTPEVTCVVVDVSHEDPEVKFNWYVDGVEVHNAKTKPREEQYNSTYRVVSVLTVLHQDWLNGKEYKCKVSNKALPAPIEKTISKAKGQPREPQVYTLPPSRDELTKNQVSLTCLVKGFYPSDIAVEWESNGQPENNYKTTPPVLDSDGSFFLYSKLTVDKSRWQQGNVFSCSVMHEALHNHYTQKSLSLSPGK

SEQ ID NO: 118 - protein, 330 aa, Artificial Sequence
  source: /note="Description of Artificial Sequence: Synthetic polypeptide"
ASTKGPSVFPLAPSSKSTSGGTAALGCLVKDYFPEPVTVSWNSGALTSGVHTFPAVLQSSGLYSLSSVVTVPSSSLGTQTYICNVNHKPSNTKVDKKVEPKSCDKTHTSPPSPAPELLGGSSVFLFPPKPKDTLMISRTPEVTCVVVDVSHEDPEVKFNWYVDGVEVHNAKTKPREEQYNSTYRVVSVLTVLHQDWLNGKEYKCKVSNKALPAPIEKTISKAKGQPREPQVYTLPPSRDELTKNQVSLTCLVKGFYPSDIAVEWESNGQPENNYKTTPPVLDSDGSFFLYSKLTVDKSRWQQGNVFSCSVMHEALHNHYTQKSLSLSPGK

SEQ ID NO: 119 - protein, 463 aa, Artificial Sequence
  source: /note="Description of Artificial Sequence: Synthetic polypeptide"
MPLLLLLPLLWAGALAQVQLVQSGAEVVKPGASVKLSCKASGYIFTSYYMYWVKQAPGQGLEWIGEINPSNGDTNFNEKFKSKATLTVDKSASTAYMELSSLRSEDTAVYYCTRSDGRNDMDSWGQGTLVTVSSASTKGPSVFPLAPSSKSTSGGTAALGCLVKDYFPEPVTVSWNSGALTSGVHTFPAVLQSSGLYSLSSVVTVPSSSLGTQTYICNVNHKPSNTKVDKKVEPKSCDKTHTCPPCPAPELLGGPSVFLFPPKPKDTLMISRTPEVTCVVVDVSHEDPEVKFNWYVDGVEVHNAKTKPREEQYQSTYRVVSVLTVLHQDWLNGKEYKCKVSNKALPAPIEKTISKAKGQPREPQVYTLPPSRDELTKNQVSLTCLVKGFYPSDIAVEWESNGQPENNYKTTPPVLDSDGSFFLYSKLTVDKSRWQQGNVFSCSVMHEALHNHYTQKSLSLSPG

SEQ ID NO: 120 - protein, 463 aa, Artificial Sequence
  source: /note="Description of Artificial Sequence: Synthetic polypeptide"
MPLLLLLPLLWAGALAQVQLVQSGAEVVKPGASVKLSCKASGYIFTSYYMYWVKQAPGQGLEWIGEINPSNGDTNFNEKFKSKATLTVDKSASTAYMELSSLRSEDTAVYYCTRSDGRNDMDSWGQGTLVTVSSASTKGPSVFPLAPSSKSTSGGTAALGCLVKDYFPEPVTVSWNSGALTSGVHTFPAVLQSSGLYSLSSVVTVPSSSLGTQTYICNVNHKPSNTKVDKKVEPKSCDKTHTCPPCPAPELLGGPSVFLFPPKPKDTLMISRTPEVTCVVVDVSHEDPEVKFNWYVDGVEVHNAKTKPREEQYNSTYRVVSVLTVLHQDWLNGKEYKCKVSNKALPAPIEKTISKAKGQPREPQVYTLPPSRDELTKNQVSLTCLVKGFYPSDIAVEWESNGQPENNYKTTPPVLDSDGSFFLYSKLTVDKSRWQQGNVFSCSVMHEALHNHYTQKSLSLSPG

SEQ ID NO: 121 - protein, 463 aa, Artificial Sequence
  source: /note="Description of Artificial Sequence: Synthetic polypeptide"
MPLLLLLPLLWAGALAQVQLVQSGAEVVKPGASVKLSCKASGYIFTSYYMYWVKQAPGQGLEWIGEINPSNGDTNFNEKFKSKATLTVDKSASTAYMELSSLRSEDTAVYYCTRSDGRNDMDSWGQGTLVTVSSASTKGPSVFPLAPSSKSTSGGTAALGCLVKDYFPEPVTVSWNSGALTSGVHTFPAVLQSSGLYSLSSVVTVPSSSLGTQTYICNVNHKPSNTKVDKKVEPKSCDKTHTCPPCPAPELLGGPSVFLFPPKPKDTLMISRTPEVTCVVVDVSHEDPEVKFNWYVDGVEVHNAKTKPREEQYGSTYRVVSVLTVLHQDWLNGKEYKCKVSNKALPAPIEKTISKAKGQPREPQVYTLPPSRDELTKNQVSLTCLVKGFYPSDIAVEWESNGQPENNYKTTPPVLDSDGSFFLYSKLTVDKSRWQQGNVFSCSVMHEALHNHYTQKSLSLSPG

SEQ ID NO: 122 - protein, 463 aa, Artificial Sequence
  source: /note="Description of Artificial Sequence: Synthetic polypeptide"
MPLLLLLPLLWAGALAQVQLVQSGAEVVKPGASVKLSCKASGYIFTSYYMYWVKQAPGQGLEWIGEINPSNGDTNFNEKFKSKATLTVDKSASTAYMELSSLRSEDTAVYYCTRSDGRNDMDSWGQGTLVTVSSASTKGPSVFPLAPSSKSTSGGTAALGCLVKDYFPEPVTVSWNSGALTSGVHTFPAVLQSSGLYSLSSVVTVPSSSLGTQTYICNVNHKPSNTKVDKKVEPKSSDKTHTSPPSPAPELLGGSSVFLFPPKPKDTLMISRTPEVTCVVVDVSHEDPEVKFNWYVDGVEVHNAKTKPREEQYNSTYRVVSVLTVLHQDWLNGKEYKCKVSNKALPAPIEKTISKAKGQPREPQVYTLPPSRDELTKNQVSLTCLVKGFYPSDIAVEWESNGQPENNYKTTPPVLDSDGSFFLYSKLTVDKSRWQQGNVFSCSVMHEALHNHYTQKSLSLSPG

SEQ ID NO: 123 - protein, 460 aa, Artificial Sequence
  source: /note="Description of Artificial Sequence: Synthetic polypeptide"
MPLLLLLPLLWAGALAQVQLVQSGAEVVKPGASVKLSCKASGYIFTSYYMYWVKQAPGQGLEWIGEINPSNGDTNFNEKFKSKATLTVDKSASTAYMELSSLRSEDTAVYYCTRSDGRNDMDSWGQGTLVTVSSASTKGPSVFPLAPCSRSTSESTAALGCLVKDYFPEPVTVSWNSGALTSGVHTFPAVLQSSGLYSLSSVVTVPSSSLGTKTYTCNVDHKPSNTKVDKRVESKYGPPCPPCPAPEFAGGPSVFLFPPKPKDTLMISRTPEVTCVVVDVSQEDPEVQFNWYVDGVEVHNAKTKPREEQFNSTYRVVSVLTVLHQDWLNGKEYKCKVSNKGLPSSIEKTISKAKGQPREPQVYTLPPSQEEMTKNQVSLTCLVKGFYPSDIAVEWESNGQPENNYKTTPPVLDSDGSFFLYSRLTVDKSRWQEGNVFSCSVMHEALHNHYTQKSLSLSLG

SEQ ID NO: 124 - protein, 460 aa, Artificial Sequence
  source: /note="Description of Artificial Sequence: Synthetic polypeptide"
MPLLLLLPLLWAGALAQVQLVQSGAEVVKPGASVKLSCKASGYIFTSYYMYWVKQAPGQGLEWIGEINPSNGDTNFNEKFKSKATLTVDKSASTAYMELSSLRSEDTAVYYCTRSDGRNDMDSWGQGTLVTVSSASTKGPSVFPLAPCSRSTSESTAALGCLVKDYFPEPVTVSWNSGALTSGVHTFPAVLQSSGLYSLSSVVTVPSSSLGTKTYTCNVDHKPSNTKVDKRVESKYGPPCPSCPAPEFLGGPSVFLFPPKPKDTLMISRTPEVTCVVVDVSQEDPEVQFNWYVDGVEVHNAKTKPREEQFNSTYRVVSVLTVLHQDWLNGKEYKCKVSNKGLPSSIEKTISKAKGQPREPQVYTLPPSQEEMTKNQVSLTCLVKGFYPSDIAVEWESNGQPENNYKTTPPVLDSDGSFFLYSRLTVDKSRWQEGNVFSCSVMHEALHNHYTQKSLSLSLG

SEQ ID NO: 125 - protein, 459 aa, Artificial Sequence
  source: /note="Description of Artificial Sequence: Synthetic polypeptide"
MPLLLLLPLLWAGALAQVQLVQSGAEVVKPGASVKLSCKASGYIFTSYYMYWVKQAPGQGLEWIGEINPSNGDTNFNEKFKSKATLTVDKSASTAYMELSSLRSEDTAVYYCTRSDGRNDMDSWGQGTLVTVSSASTKGPSVFPLAPCSRSTSESTAALGCLVKDYFPEPVTVSWNSGALTSGVHTFPAVLQSSGLYSLSSVVTVTSSNFGTQTYTCNVDHKPSNTKVDKTVERKCCVECPPCPAPPVAGPSVFLFPPKPKDTLMISRTPEVTCVVVDVSHEDPEVQFNWYVDGMEVHNAKTKPREEQFNSTFRVVSVLTVVHQDWLNGKEYKCKVSNKGLPAPIEKTISKTKGQPREPQVYTLPPSREEMTKNQVSLTCLVKGFYPSDIAVEWESNGQPENNYKTTPPMLDSDGSFFLYSKLTVDKSRWQQGNVFSCSVMHEALHNHYTQKSLSLSPG

SEQ ID NO: 126 - protein, 456 aa, Artificial Sequence
  source: /note="Description of Artificial Sequence: Synthetic polypeptide"
MPLLLLLPLLWAGALAQVQLVQSGAEVVKPGASVKLSCKASGYIFTSYYMYWVKQAPGQGLEWIGEINPSNGDTNFNEKFKSKATLTVDKSASTAYMELSSLRSEDTAVYYCTRSDGRNDMDSWGQGTLVTVSSASTKGPSVFPLAPSSKSTSGGTAALGCLVKDYFPEPVTVSWNSGALTSGVHTFPAVLQSSGLYSLSSVVTVPSSSLGTQTYICNVNHKPSNTKVDKKVTHTSPPSPAPELLGGSSVFLFPPKPKDTLMISRTPEVTCVVVDVSHEDPEVKFNWYVDGVEVHNAKTKPREEQYNSTYRVVSVLTVLHQDWLNGKEYKCKVSNKALPAPIEKTISKAKGQPREPQVYTLPPSRDELTKNQVSLTCLVKGFYPSDIAVEWESNGQPENNYKTTPPVLDSDGSFFLYSKLTVDKSRWQQGNVFSCSVMHEALHNHYTQKSLSLSPG

SEQ ID NO: 127 - protein, 463 aa, Artificial Sequence
  source: /note="Description of Artificial Sequence: Synthetic polypeptide"
MPLLLLLPLLWAGALAQVQLVQSGAEVVKPGASVKLSCKASGYIFTSYYMYWVKQAPGQGLEWIGEINPSNGDTNFNEKFKSKATLTVDKSASTAYMELSSLRSEDTAVYYCTRSDGRNDMDSWGQGTLVTVSSASTKGPSVFPLAPSSKSTSGGTAALGCLVKDYFPEPVTVSWNSGALTSGVHTFPAVLQSSGLYSLSSVVTVPSSSLGTQTYICNVNHKPSNTKVDKKVEPKSSDKTHTSPPSPAPELLGGSSVFLFPPKPKDTLMISRTPEVTCVVVDVSHEDPEVKFNWYVDGVEVHNAKTKPREEQYQSTYRVVSVLTVLHQDWLNGKEYKCKVSNKALPAPIEKTISKAKGQPREPQVYTLPPSRDELTKNQVSLTCLVKGFYPSDIAVEWESNGQPENNYKTTPPVLDSDGSFFLYSKLTVDKSRWQQGNVFSCSVMHEALHNHYTQKSLSLSPG

SEQ ID NO: 128 - protein, 456 aa, Artificial Sequence
  source: /note="Description of Artificial Sequence: Synthetic polypeptide"
MPLLLLLPLLWAGALAQVQLVQSGAEVVKPGASVKLSCKASGYIFTSYYMYWVKQAPGQGLEWIGEINPSNGDTNFNEKFKSKATLTVDKSASTAYMELSSLRSEDTAVYYCTRSDGRNDMDSWGQGTLVTVSSASTKGPSVFPLAPSSKSTSGGTAALGCLVKDYFPEPVTVSWNSGALTSGVHTFPAVLQSSGLYSLSSVVTVPSSSLGTQTYICNVNHKPSNTKVDKKVTHTSPPSPAPELLGGSSVFLFPPKPKDTLMISRTPEVTCVVVDVSHEDPEVKFNWYVDGVEVHNAKTKPREEQYQSTYRVVSVLTVLHQDWLNGKEYKCKVSNKALPAPIEKTISKAKGQPREPQVYTLPPSRDELTKNQVSLTCLVKGFYPSDIAVEWESNGQPENNYKTTPPVLDSDGSFFLYSKLTVDKSRWQQGNVFSCSVMHEALHNHYTQKSLSLSPG

SEQ ID NO: 129 - protein, 463 aa, Artificial Sequence
  source: /note="Description of Artificial Sequence: Synthetic polypeptide"
MPLLLLLPLLWAGALAQVQLVQSGAEVVKPGASVKLSCKASGYIFTSYYMYWVKQAPGQGLEWIGEINPSNGDTNFNEKFKSKATLTVDKSASTAYMELSSLRSEDTAVYYCTRSDGRNDMDSWGQGTLVTVSSASTKGPSVFPLAPSSKSTSGGTAALGCLVKDYFPEPVTVSWNSGALTSGVHTFPAVLQSSGLYSLSSVVTVPSSSLGTQTYICNVNHKPSNTKVDKKVEPKSSDKTHTSPPSPAPELLGGSSVFLFPPKPKDTLMISRTPEVTCVVVDVSHEDPEVKFNWYVDGVEVHNAKTKPREEQYGSTYRVVSVLTVLHQDWLNGKEYKCKVSNKALPAPIEKTISKAKGQPREPQVYTLPPSRDELTKNQVSLTCLVKGFYPSDIAVEWESNGQPENNYKTTPPVLDSDGSFFLYSKLTVDKSRWQQGNVFSCSVMHEALHNHYTQKSLSLSPG

SEQ ID NO: 130 - protein, 456 aa, Artificial Sequence
  source: /note="Description of Artificial Sequence: Synthetic polypeptide"
MPLLLLLPLLWAGALAQVQLVQSGAEVVKPGASVKLSCKASGYIFTSYYMYWVKQAPGQGLEWIGEINPSNGDTNFNEKFKSKATLTVDKSASTAYMELSSLRSEDTAVYYCTRSDGRNDMDSWGQGTLVTVSSASTKGPSVFPLAPSSKSTSGGTAALGCLVKDYFPEPVTVSWNSGALTSGVHTFPAVLQSSGLYSLSSVVTVPSSSLGTQTYICNVNHKPSNTKVDKKVTHTSPPSPAPELLGGSSVFLFPPKPKDTLMISRTPEVTCVVVDVSHEDPEVKFNWYVDGVEVHNAKTKPREEQYGSTYRVVSVLTVLHQDWLNGKEYKCKVSNKALPAPIEKTISKAKGQPREPQVYTLPPSRDELTKNQVSLTCLVKGFYPSDIAVEWESNGQPENNYKTTPPVLDSDGSFFLYSKLTVDKSRWQQGNVFSCSVMHEALHNHYTQKSLSLSPG

SEQ ID NO: 131 - protein, 463 aa, Artificial Sequence
  source: /note="Description of Artificial Sequence: Synthetic polypeptide"
MPLLLLLPLLWAGALAQVQLVQSGAEVVKPGASVKLSCKASGYIFTSYYMYWVKQAPGQGLEWIGEINPSNGDTNFNEKFKSKATLTVDKSASTAYMELSSLRSEDTAVYYCTRSDGRNDMDSWGQGTLVTVSSASTKGPSVFPLAPSSKSTSGGTAALGCLVKDYFPEPVTVSWNSGALTSGVHTFPAVLQSSGLYSLSSVVTVPSSSLGTQTYICNVNHKPSNTKVDKKVEPKSCDKTHTCPPCPAPEAAGGPSVFLFPPKPKDTLMISRTPEVTCVVVDVSHEDPEVKFNWYVDGVEVHNAKTKPREEQYNSTYRVVSVLTVLHQDWLNGKEYKCKVSNKALPAPIEKTISKAKGQPREPQVYTLPPSRDELTKNQVSLTCLVKGFYPSDIAVEWESNGQPENNYKTTPPVLDSDGSFFLYSKLTVDKSRWQQGNVFSCSVMHEALHNHYTQKSLSLSPG

SEQ ID NO: 132 - protein, 463 aa, Artificial Sequence
  source: /note="Description of Artificial Sequence: Synthetic polypeptide"
MPLLLLLPLLWAGALAQVQLVQSGAEVVKPGASVKLSCKASGYIFTSYYMYWVKQAPGQGLEWIGEINPSNGDTNFNEKFKSKATLTVDKSASTAYMELSSLRSEDTAVYYCTRSDGRNDMDSWGQGTLVTVSSASTKGPSVFPLAPSSKSTSGGTAALGCLVKDYFPEPVTVSWNSGALTSGVHTFPAVLQSSGLYSLSSVVTVPSSSLGTQTYICNVNHKPSNTKVDKKVEPKSCDKTHTSPPSPAPELLGGSSVFLFPPKPKDTLMISRTPEVTCVVVDVSHEDPEVKFNWYVDGVEVHNAKTKPREEQYNSTYRVVSVLTVLHQDWLNGKEYKCKVSNKALPAPIEKTISKAKGQPREPQVYTLPPSRDELTKNQVSLTCLVKGFYPSDIAVEWESNGQPENNYKTTPPVLDSDGSFFLYSKLTVDKSRWQQGNVFSCSVMHEALHNHYTQKSLSLSPG

SEQ ID NO: 133 - protein, 464 aa, Artificial Sequence
  source: /note="Description of Artificial Sequence: Synthetic polypeptide"
MPLLLLLPLLWAGALAQVQLVQSGAEVVKPGASVKLSCKASGYIFTSYYMYWVKQAPGQGLEWIGEINPSNGDTNFNEKFKSKATLTVDKSASTAYMELSSLRSEDTAVYYCTRSDGRNDMDSWGQGTLVTVSSASTKGPSVFPLAPSSKSTSGGTAALGCLVKDYFPEPVTVSWNSGALTSGVHTFPAVLQSSGLYSLSSVVTVPSSSLGTQTYICNVNHKPSNTKVDKKVEPKSCDKTHTCPPCPAPELLGGPSVFLFPPKPKDTLMISRTPEVTCVVVDVSHEDPEVKFNWYVDGVEVHNAKTKPREEQYQSTYRVVSVLTVLHQDWLNGKEYKCKVSNKALPAPIEKTISKAKGQPREPQVYTLPPSRDELTKNQVSLTCLVKGFYPSDIAVEWESNGQPENNYKTTPPVLDSDGSFFLYSKLTVDKSRWQQGNVFSCSVMHEALHNHYTQKSLSLSPGK

SEQ ID NO: 134 - protein, 464 aa, Artificial Sequence
  source: /note="Description of Artificial Sequence: Synthetic polypeptide"
MPLLLLLPLLWAGALAQVQLVQSGAEVVKPGASVKLSCKASGYIFTSYYMYWVKQAPGQGLEWIGEINPSNGDTNFNEKFKSKATLTVDKSASTAYMELSSLRSEDTAVYYCTRSDGRNDMDSWGQGTLVTVSSASTKGPSVFPLAPSSKSTSGGTAALGCLVKDYFPEPVTVSWNSGALTSGVHTFPAVLQSSGLYSLSSVVTVPSSSLGTQTYICNVNHKPSNTKVDKKVEPKSCDKTHTCPPCPAPELLGGPSVFLFPPKPKDTLMISRTPEVTCVVVDVSHEDPEVKFNWYVDGVEVHNAKTKPREEQYNSTYRVVSVLTVLHQDWLNGKEYKCKVSNKALPAPIEKTISKAKGQPREPQVYTLPPSRDELTKNQVSLTCLVKGFYPSDIAVEWESNGQPENNYKTTPPVLDSDGSFFLYSKLTVDKSRWQQGNVFSCSVMHEALHNHYTQKSLSLSPGK

SEQ ID NO: 135 - protein, 464 aa, Artificial Sequence
  source: /note="Description of Artificial Sequence: Synthetic polypeptide"
MPLLLLLPLLWAGALAQVQLVQSGAEVVKPGASVKLSCKASGYIFTSYYMYWVKQAPGQGLEWIGEINPSNGDTNFNEKFKSKATLTVDKSASTAYMELSSLRSEDTAVYYCTRSDGRNDMDSWGQGTLVTVSSASTKGPSVFPLAPSSKSTSGGTAALGCLVKDYFPEPVTVSWNSGALTSGVHTFPAVLQSSGLYSLSSVVTVPSSSLGTQTYICNVNHKPSNTKVDKKVEPKSCDKTHTCPPCPAPELLGGPSVFLFPPKPKDTLMISRTPEVTCVVVDVSHEDPEVKFNWYVDGVEVHNAKTKPREEQYGSTYRVVSVLTVLHQDWLNGKEYKCKVSNKALPAPIEKTISKAKGQPREPQVYTLPPSRDELTKNQVSLTCLVKGFYPSDIAVEWESNGQPENNYKTTPPVLDSDGSFFLYSKLTVDKSRWQQGNVFSCSVMHEALHNHYTQKSLSLSPGK

SEQ ID NO: 136 - protein, 464 aa, Artificial Sequence
  source: /note="Description of Artificial Sequence: Synthetic polypeptide"
MPLLLLLPLLWAGALAQVQLVQSGAEVVKPGASVKLSCKASGYIFTSYYMYWVKQAPGQGLEWIGEINPSNGDTNFNEKFKSKATLTVDKSASTAYMELSSLRSEDTAVYYCTRSDGRNDMDSWGQGTLVTVSSASTKGPSVFPLAPSSKSTSGGTAALGCLVKDYFPEPVTVSWNSGALTSGVHTFPAVLQSSGLYSLSSVVTVPSSSLGTQTYICNVNHKPSNTKVDKKVEPKSSDKTHTSPPSPAPELLGGSSVFLFPPKPKDTLMISRTPEVTCVVVDVSHEDPEVKFNWYVDGVEVHNAKTKPREEQYNSTYRVVSVLTVLHQDWLNGKEYKCKVSNKALPAPIEKTISKAKGQPREPQVYTLPPSRDELTKNQVSLTCLVKGFYPSDIAVEWESNGQPENNYKTTPPVLDSDGSFFLYSKLTVDKSRWQQGNVFSCSVMHEALHNHYTQKSLSLSPGK

SEQ ID NO: 137 - protein, 461 aa, Artificial Sequence
  source: /note="Description of Artificial Sequence: Synthetic polypeptide"
MPLLLLLPLLWAGALAQVQLVQSGAEVVKPGASVKLSCKASGYIFTSYYMYWVKQAPGQGLEWIGEINPSNGDTNFNEKFKSKATLTVDKSASTAYMELSSLRSEDTAVYYCTRSDGRNDMDSWGQGTLVTVSSASTKGPSVFPLAPCSRSTSESTAALGCLVKDYFPEPVTVSWNSGALTSGVHTFPAVLQSSGLYSLSSVVTVPSSSLGTKTYTCNVDHKPSNTKVDKRVESKYGPPCPPCPAPEFAGGPSVFLFPPKPKDTLMISRTPEVTCVVVDVSQEDPEVQFNWYVDGVEVHNAKTKPREEQFNSTYRVVSVLTVLHQDWLNGKEYKCKVSNKGLPSSIEKTISKAKGQPREPQVYTLPPSQEEMTKNQVSLTCLVKGFYPSDIAVEWESNGQPENNYKTTPPVLDSDGSFFLYSRLTVDKSRWQEGNVFSCSVMHEALHNHYTQKSLSLSLGK

SEQ ID NO: 138 - protein, 461 aa, Artificial Sequence
  source: /note="Description of Artificial Sequence: Synthetic polypeptide"
MPLLLLLPLLWAGALAQVQLVQSGAEVVKPGASVKLSCKASGYIFTSYYMYWVKQAPGQGLEWIGEINPSNGDTNFNEKFKSKATLTVDKSASTAYMELSSLRSEDTAVYYCTRSDGRNDMDSWGQGTLVTVSSASTKGPSVFPLAPCSRSTSESTAALGCLVKDYFPEPVTVSWNSGALTSGVHTFPAVLQSSGLYSLSSVVTVPSSSLGTKTYTCNVDHKPSNTKVDKRVESKYGPPCPSCPAPEFLGGPSVFLFPPKPKDTLMISRTPEVTCVVVDVSQEDPEVQFNWYVDGVEVHNAKTKPREEQFNSTYRVVSVLTVLHQDWLNGKEYKCKVSNKGLPSSIEKTISKAKGQPREPQVYTLPPSQEEMTKNQVSLTCLVKGFYPSDIAVEWESNGQPENNYKTTPPVLDSDGSFFLYSRLTVDKSRWQEGNVFSCSVMHEALHNHYTQKSLSLSLGK

SEQ ID NO: 139 - protein, 460 aa, Artificial Sequence
  source: /note="Description of Artificial Sequence: Synthetic polypeptide"
MPLLLLLPLLWAGALAQVQLVQSGAEVVKPGASVKLSCKASGYIFTSYYMYWVKQAPGQGLEWIGEINPSNGDTNFNEKFKSKATLTVDKSASTAYMELSSLRSEDTAVYYCTRSDGRNDMDSWGQGTLVTVSSASTKGPSVFPLAPCSRSTSESTAALGCLVKDYFPEPVTVSWNSGALTSGVHTFPAVLQSSGLYSLSSVVTVTSSNFGTQTYTCNVDHKPSNTKVDKTVERKCCVECPPCPAPPVAGPSVFLFPPKPKDTLMISRTPEVTCVVVDVSHEDPEVQFNWYVDGMEVHNAKTKPREEQFNSTFRVVSVLTVVHQDWLNGKEYKCKVSNKGLPAPIEKTISKTKGQPREPQVYTLPPSREEMTKNQVSLTCLVKGFYPSDIAVEWESNGQPENNYKTTPPMLDSDGSFFLYSKLTVDKSRWQQGNVFSCSVMHEALHNHYTQKSLSLSPGK

SEQ ID NO: 140 - protein, 457 aa, Artificial Sequence
  source: /note="Description of Artificial Sequence: Synthetic polypeptide"
MPLLLLLPLLWAGALAQVQLVQSGAEVVKPGASVKLSCKASGYIFTSYYMYWVKQAPGQGLEWIGEINPSNGDTNFNEKFKSKATLTVDKSASTAYMELSSLRSEDTAVYYCTRSDGRNDMDSWGQGTLVTVSSASTKGPSVFPLAPSSKSTSGGTAALGCLVKDYFPEPVTVSWNSGALTSGVHTFPAVLQSSGLYSLSSVVTVPSSSLGTQTYICNVNHKPSNTKVDKKVTHTSPPSPAPELLGGSSVFLFPPKPKDTLMISRTPEVTCVVVDVSHEDPEVKFNWYVDGVEVHNAKTKPREEQYNSTYRVVSVLTVLHQDWLNGKEYKCKVSNKALPAPIEKTISKAKGQPREPQVYTLPPSRDELTKNQVSLTCLVKGFYPSDIAVEWESNGQPENNYKTTPPVLDSDGSFFLYSKLTVDKSRWQQGNVFSCSVMHEALHNHYTQKSLSLSPGK

SEQ ID NO: 141 - protein, 464 aa, Artificial Sequence
  source: /note="Description of Artificial Sequence: Synthetic polypeptide"
MPLLLLLPLLWAGALAQVQLVQSGAEVVKPGASVKLSCKASGYIFTSYYMYWVKQAPGQGLEWIGEINPSNGDTNFNEKFKSKATLTVDKSASTAYMELSSLRSEDTAVYYCTRSDGRNDMDSWGQGTLVTVSSASTKGPSVFPLAPSSKSTSGGTAALGCLVKDYFPEPVTVSWNSGALTSGVHTFPAVLQSSGLYSLSSVVTVPSSSLGTQTYICNVNHKPSNTKVDKKVEPKSSDKTHTSPPSPAPELLGGSSVFLFPPKPKDTLMISRTPEVTCVVVDVSHEDPEVKFNWYVDGVEVHNAKTKPREEQYQSTYRVVSVLTVLHQDWLNGKEYKCKVSNKALPAPIEKTISKAKGQPREPQVYTLPPSRDELTKNQVSLTCLVKGFYPSDIAVEWESNGQPENNYKTTPPVLDSDGSFFLYSKLTVDKSRWQQGNVFSCSVMHEALHNHYTQKSLSLSPGK

SEQ ID NO: 142 - protein, 457 aa, Artificial Sequence
  source: /note="Description of Artificial Sequence: Synthetic polypeptide"
MPLLLLLPLLWAGALAQVQLVQSGAEVVKPGASVKLSCKASGYIFTSYYMYWVKQAPGQGLEWIGEINPSNGDTNFNEKFKSKATLTVDKSASTAYMELSSLRSEDTAVYYCTRSDGRNDMDSWGQGTLVTVSSASTKGPSVFPLAPSSKSTSGGTAALGCLVKDYFPEPVTVSWNSGALTSGVHTFPAVLQSSGLYSLSSVVTVPSSSLGTQTYICNVNHKPSNTKVDKKVTHTSPPSPAPELLGGSSVFLFPPKPKDTLMISRTPEVTCVVVDVSHEDPEVKFNWYVDGVEVHNAKTKPREEQYQSTYRVVSVLTVLHQDWLNGKEYKCKVSNKALPAPIEKTISKAKGQPREPQVYTLPPSRDELTKNQVSLTCLVKGFYPSDIAVEWESNGQPENNYKTTPPVLDSDGSFFLYSKLTVDKSRWQQGNVFSCSVMHEALHNHYTQKSLSLSPGK

SEQ ID NO: 143 - protein, 464 aa, Artificial Sequence
  source: /note="Description of Artificial Sequence: Synthetic polypeptide"
MPLLLLLPLLWAGALAQVQLVQSGAEVVKPGASVKLSCKASGYIFTSYYMYWVKQAPGQGLEWIGEINPSNGDTNFNEKFKSKATLTVDKSASTAYMELSSLRSEDTAVYYCTRSDGRNDMDSWGQGTLVTVSSASTKGPSVFPLAPSSKSTSGGTAALGCLVKDYFPEPVTVSWNSGALTSGVHTFPAVLQSSGLYSLSSVVTVPSSSLGTQTYICNVNHKPSNTKVDKKVEPKSSDKTHTSPPSPAPELLGGSSVFLFPPKPKDTLMISRTPEVTCVVVDVSHEDPEVKFNWYVDGVEVHNAKTKPREEQYGSTYRVVSVLTVLHQDWLNGKEYKCKVSNKALPAPIEKTISKAKGQPREPQVYTLPPSRDELTKNQVSLTCLVKGFYPSDIAVEWESNGQPENNYKTTPPVLDSDGSFFLYSKLTVDKSRWQQGNVFSCSVMHEALHNHYTQKSLSLSPGK

SEQ ID NO: 144 - protein, 457 aa, Artificial Sequence
  source: /note="Description of Artificial Sequence: Synthetic polypeptide"
MPLLLLLPLLWAGALAQVQLVQSGAEVVKPGASVKLSCKASGYIFTSYYMYWVKQAPGQGLEWIGEINPSNGDTNFNEKFKSKATLTVDKSASTAYMELSSLRSEDTAVYYCTRSDGRNDMDSWGQGTLVTVSSASTKGPSVFPLAPSSKSTSGGTAALGCLVKDYFPEPVTVSWNSGALTSGVHTFPAVLQSSGLYSLSSVVTVPSSSLGTQTYICNVNHKPSNTKVDKKVTHTSPPSPAPELLGGSSVFLFPPKPKDTLMISRTPEVTCVVVDVSHEDPEVKFNWYVDGVEVHNAKTKPREEQYGSTYRVVSVLTVLHQDWLNGKEYKCKVSNKALPAPIEKTISKAKGQPREPQVYTLPPSRDELTKNQVSLTCLVKGFYPSDIAVEWESNGQPENNYKTTPPVLDSDGSFFLYSKLTVDKSRWQQGNVFSCSVMHEALHNHYTQKSLSLSPGK

SEQ ID NO: 145 - protein, 464 aa, Artificial Sequence
  source: /note="Description of Artificial Sequence: Synthetic polypeptide"
MPLLLLLPLLWAGALAQVQLVQSGAEVVKPGASVKLSCKASGYIFTSYYMYWVKQAPGQGLEWIGEINPSNGDTNFNEKFKSKATLTVDKSASTAYMELSSLRSEDTAVYYCTRSDGRNDMDSWGQGTLVTVSSASTKGPSVFPLAPSSKSTSGGTAALGCLVKDYFPEPVTVSWNSGALTSGVHTFPAVLQSSGLYSLSSVVTVPSSSLGTQTYICNVNHKPSNTKVDKKVEPKSCDKTHTCPPCPAPEAAGGPSVFLFPPKPKDTLMISRTPEVTCVVVDVSHEDPEVKFNWYVDGVEVHNAKTKPREEQYNSTYRVVSVLTVLHQDWLNGKEYKCKVSNKALPAPIEKTISKAKGQPREPQVYTLPPSRDELTKNQVSLTCLVKGFYPSDIAVEWESNGQPENNYKTTPPVLDSDGSFFLYSKLTVDKSRWQQGNVFSCSVMHEALHNHYTQKSLSLSPGK

SEQ ID NO: 146 - protein, 464 aa, Artificial Sequence
  source: /note="Description of Artificial Sequence: Synthetic polypeptide"
MPLLLLLPLLWAGALAQVQLVQSGAEVVKPGASVKLSCKASGYIFTSYYMYWVKQAPGQGLEWIGEINPSNGDTNFNEKFKSKATLTVDKSASTAYMELSSLRSEDTAVYYCTRSDGRNDMDSWGQGTLVTVSSASTKGPSVFPLAPSSKSTSGGTAALGCLVKDYFPEPVTVSWNSGALTSGVHTFPAVLQSSGLYSLSSVVTVPSSSLGTQTYICNVNHKPSNTKVDKKVEPKSCDKTHTSPPSPAPELLGGSSVFLFPPKPKDTLMISRTPEVTCVVVDVSHEDPEVKFNWYVDGVEVHNAKTKPREEQYNSTYRVVSVLTVLHQDWLNGKEYKCKVSNKALPAPIEKTISKAKGQPREPQVYTLPPSRDELTKNQVSLTCLVKGFYPSDIAVEWESNGQPENNYKTTPPVLDSDGSFFLYSKLTVDKSRWQQGNVFSCSVMHEALHNHYTQKSLSLSPGK

SEQ ID NO: 147 - protein, 447 aa, Artificial Sequence
  source: /note="Description of Artificial Sequence: Synthetic polypeptide"
QVQLVQSGAEVVKPGASVKLSCKASGYIFTSYYMYWVKQAPGQGLEWIGEINPSNGDTNFNEKFKSKATLTVDKSASTAYMELSSLRSEDTAVYYCTRSDGRNDMDSWGQGTLVTVSSASTKGPSVFPLAPSSKSTSGGTAALGCLVKDYFPEPVTVSWNSGALTSGVHTFPAVLQSSGLYSLSSVVTVPSSSLGTQTYICNVNHKPSNTKVDKKVEPKSCDKTHTCPPCPAPELLGGPSVFLFPPKPKDTLMISRTPEVTCVVVDVSHEDPEVKFNWYVDGVEVHNAKTKPREEQYQSTYRVVSVLTVLHQDWLNGKEYKCKVSNKALPAPIEKTISKAKGQPREPQVYTLPPSRDELTKNQVSLTCLVKGFYPSDIAVEWESNGQPENNYKTTPPVLDSDGSFFLYSKLTVDKSRWQQGNVFSCSVMHEALHNHYTQKSLSLSPG

SEQ ID NO: 148 - protein, 447 aa, Artificial Sequence
  source: /note="Description of Artificial Sequence: Synthetic polypeptide"
QVQLVQSGAEVVKPGASVKLSCKASGYIFTSYYMYWVKQAPGQGLEWIGEINPSNGDTNFNEKFKSKATLTVDKSASTAYMELSSLRSEDTAVYYCTRSDGRNDMDSWGQGTLVTVSSASTKGPSVFPLAPSSKSTSGGTAALGCLVKDYFPEPVTVSWNSGALTSGVHTFPAVLQSSGLYSLSSVVTVPSSSLGTQTYICNVNHKPSNTKVDKKVEPKSCDKTHTCPPCPAPELLGGPSVFLFPPKPKDTLMISRTPEVTCVVVDVSHEDPEVKFNWYVDGVEVHNAKTKPREEQYNSTYRVVSVLTVLHQDWLNGKEYKCKVSNKALPAPIEKTISKAKGQPREPQVYTLPPSRDELTKNQVSLTCLVKGFYPSDIAVEWESNGQPENNYKTTPPVLDSDGSFFLYSKLTVDKSRWQQGNVFSCSVMHEALHNHYTQKSLSLSPG

SEQ ID NO: 149 - protein, 447 aa, Artificial Sequence
  source: /note="Description of Artificial Sequence: Synthetic polypeptide"
QVQLVQSGAEVVKPGASVKLSCKASGYIFTSYYMYWVKQAPGQGLEWIGEINPSNGDTNFNEKFKSKATLTVDKSASTAYMELSSLRSEDTAVYYCTRSDGRNDMDSWGQGTLVTVSSASTKGPSVFPLAPSSKSTSGGTAALGCLVKDYFPEPVTVSWNSGALTSGVHTFPAVLQSSGLYSLSSVVTVPSSSLGTQTYICNVNHKPSNTKVDKKVEPKSCDKTHTCPPCPAPELLGGPSVFLFPPKPKDTLMISRTPEVTCVVVDVSHEDPEVKFNWYVDGVEVHNAKTKPREEQYGSTYRVVSVLTVLHQDWLNGKEYKCKVSNKALPAPIEKTISKAKGQPREPQVYTLPPSRDELTKNQVSLTCLVKGFYPSDIAVEWESNGQPENNYKTTPPVLDSDGSFFLYSKLTVDKSRWQQGNVFSCSVMHEALHNHYTQKSLSLSPG

SEQ ID NO: 150 - protein, 447 aa, Artificial Sequence
  source: /note="Description of Artificial Sequence: Synthetic polypeptide"
QVQLVQSGAEVVKPGASVKLSCKASGYIFTSYYMYWVKQAPGQGLEWIGEINPSNGDTNFNEKFKSKATLTVDKSASTAYMELSSLRSEDTAVYYCTRSDGRNDMDSWGQGTLVTVSSASTKGPSVFPLAPSSKSTSGGTAALGCLVKDYFPEPVTVSWNSGALTSGVHTFPAVLQSSGLYSLSSVVTVPSSSLGTQTYICNVNHKPSNTKVDKKVEPKSSDKTHTSPPSPAPELLGGSSVFLFPPKPKDTLMISRTPEVTCVVVDVSHEDPEVKFNWYVDGVEVHNAKTKPREEQYNSTYRVVSVLTVLHQDWLNGKEYKCKVSNKALPAPIEKTISKAKGQPREPQVYTLPPSRDELTKNQVSLTCLVKGFYPSDIAVEWESNGQPENNYKTTPPVLDSDGSFFLYSKLTVDKSRWQQGNVFSCSVMHEALHNHYTQKSLSLSPG

SEQ ID NO: 151 - protein, 444 aa, Artificial Sequence
  source: /note="Description of Artificial Sequence: Synthetic polypeptide"
QVQLVQSGAEVVKPGASVKLSCKASGYIFTSYYMYWVKQAPGQGLEWIGEINPSNGDTNFNEKFKSKATLTVDKSASTAYMELSSLRSEDTAVYYCTRSDGRNDMDSWGQGTLVTVSSASTKGPSVFPLAPCSRSTSESTAALGCLVKDYFPEPVTVSWNSGALTSGVHTFPAVLQSSGLYSLSSVVTVPSSSLGTKTYTCNVDHKPSNTKVDKRVESKYGPPCPPCPAPEFAGGPSVFLFPPKPKDTLMISRTPEVTCVVVDVSQEDPEVQFNWYVDGVEVHNAKTKPREEQFNSTYRVVSVLTVLHQDWLNGKEYKCKVSNKGLPSSIEKTISKAKGQPREPQVYTLPPSQEEMTKNQVSLTCLVKGFYPSDIAVEWESNGQPENNYKTTPPVLDSDGSFFLYSRLTVDKSRWQEGNVFSCSVMHEALHNHYTQKSLSLSLG

SEQ ID NO: 152 - protein, 444 aa, Artificial Sequence
  source: /note="Description of Artificial Sequence: Synthetic polypeptide"
QVQLVQSGAEVVKPGASVKLSCKASGYIFTSYYMYWVKQAPGQGLEWIGEINPSNGDTNFNEKFKSKATLTVDKSASTAYMELSSLRSEDTAVYYCTRSDGRNDMDSWGQGTLVTVSSASTKGPSVFPLAPCSRSTSESTAALGCLVKDYFPEPVTVSWNSGALTSGVHTFPAVLQSSGLYSLSSVVTVPSSSLGTKTYTCNVDHKPSNTKVDKRVESKYGPPCPSCPAPEFLGGPSVFLFPPKPKDTLMISRTPEVTCVVVDVSQEDPEVQFNWYVDGVEVHNAKTKPREEQFNSTYRVVSVLTVLHQDWLNGKEYKCKVSNKGLPSSIEKTISKAKGQPREPQVYTLPPSQEEMTKNQVSLTCLVKGFYPSDIAVEWESNGQPENNYKTTPPVLDSDGSFFLYSRLTVDKSRWQEGNVFSCSVMHEALHNHYTQKSLSLSLG

SEQ ID NO: 153 - protein, 443 aa, Artificial Sequence
  source: /note="Description of Artificial Sequence: Synthetic polypeptide"
QVQLVQSGAEVVKPGASVKLSCKASGYIFTSYYMYWVKQAPGQGLEWIGEINPSNGDTNFNEKFKSKATLTVDKSASTAYMELSSLRSEDTAVYYCTRSDGRNDMDSWGQGTLVTVSSASTKGPSVFPLAPCSRSTSESTAALGCLVKDYFPEPVTVSWNSGALTSGVHTFPAVLQSSGLYSLSSVVTVTSSNFGTQTYTCNVDHKPSNTKVDKTVERKCCVECPPCPAPPVAGPSVFLFPPKPKDTLMISRTPEVTCVVVDVSHEDPEVQFNWYVDGMEVHNAKTKPREEQFNSTFRVVSVLTVVHQDWLNGKEYKCKVSNKGLPAPIEKTISKTKGQPREPQVYTLPPSREEMTKNQVSLTCLVKGFYPSDIAVEWESNGQPENNYKTTPPMLDSDGSFFLYSKLTVDKSRWQQGNVFSCSVMHEALHNHYTQKSLSLSPG

SEQ ID NO: 154 - protein, 440 aa, Artificial Sequence
  source: /note="Description of Artificial Sequence: Synthetic polypeptide"
QVQLVQSGAEVVKPGASVKLSCKASGYIFTSYYMYWVKQAPGQGLEWIGEINPSNGDTNFNEKFKSKATLTVDKSASTAYMELSSLRSEDTAVYYCTRSDGRNDMDSWGQGTLVTVSSASTKGPSVFPLAPSSKSTSGGTAALGCLVKDYFPEPVTVSWNSGALTSGVHTFPAVLQSSGLYSLSSVVTVPSSSLGTQTYICNVNHKPSNTKVDKKVTHTSPPSPAPELLGGSSVFLFPPKPKDTLMISRTPEVTCVVVDVSHEDPEVKFNWYVDGVEVHNAKTKPREEQYNSTYRVVSVLTVLHQDWLNGKEYKCKVSNKALPAPIEKTISKAKGQPREPQVYTLPPSRDELTKNQVSLTCLVKGFYPSDIAVEWESNGQPENNYKTTPPVLDSDGSFFLYSKLTVDKSRWQQGNVFSCSVMHEALHNHYTQKSLSLSPG

SEQ ID NO: 155 - protein, 447 aa, Artificial Sequence
  source: /note="Description of Artificial Sequence: Synthetic polypeptide"
QVQLVQSGAEVVKPGASVKLSCKASGYIFTSYYMYWVKQAPGQGLEWIGEINPSNGDTNFNEKFKSKATLTVDKSASTAYMELSSLRSEDTAVYYCTRSDGRNDMDSWGQGTLVTVSSASTKGPSVFPLAPSSKSTSGGTAALGCLVKDYFPEPVTVSWNSGALTSGVHTFPAVLQSSGLYSLSSVVTVPSSSLGTQTYICNVNHKPSNTKVDKKVEPKSSDKTHTSPPSPAPELLGGSSVFLFPPKPKDTLMISRTPEVTCVVVDVSHEDPEVKFNWYVDGVEVHNAKTKPREEQYQSTYRVVSVLTVLHQDWLNGKEYKCKVSNKALPAPIEKTISKAKGQPREPQVYTLPPSRDELTKNQVSLTCLVKGFYPSDIAVEWESNGQPENNYKTTPPVLDSDGSFFLYSKLTVDKSRWQQGNVFSCSVMHEALHNHYTQKSLSLSPG

SEQ ID NO: 156 - protein, 440 aa, Artificial Sequence
  source: /note="Description of Artificial Sequence: Synthetic polypeptide"
QVQLVQSGAEVVKPGASVKLSCKASGYIFTSYYMYWVKQAPGQGLEWIGEINPSNGDTNFNEKFKSKATLTVDKSASTAYMELSSLRSEDTAVYYCTRSDGRNDMDSWGQGTLVTVSSASTKGPSVFPLAPSSKSTSGGTAALGCLVKDYFPEPVTVSWNSGALTSGVHTFPAVLQSSGLYSLSSVVTVPSSSLGTQTYICNVNHKPSNTKVDKKVTHTSPPSPAPELLGGSSVFLFPPKPKDTLMISRTPEVTCVVVDVSHEDPEVKFNWYVDGVEVHNAKTKPREEQYQSTYRVVSVLTVLHQDWLNGKEYKCKVSNKALPAPIEKTISKAKGQPREPQVYTLPPSRDELTKNQVSLTCLVKGFYPSDIAVEWESNGQPENNYKTTPPVLDSDGSFFLYSKLTVDKSRWQQGNVFSCSVMHEALHNHYTQKSLSLSPG

SEQ ID NO: 157 - protein, 447 aa, Artificial Sequence
  source: /note="Description of Artificial Sequence: Synthetic polypeptide"
QVQLVQSGAEVVKPGASVKLSCKASGYIFTSYYMYWVKQAPGQGLEWIGEINPSNGDTNFNEKFKSKATLTVDKSASTAYMELSSLRSEDTAVYYCTRSDGRNDMDSWGQGTLVTVSSASTKGPSVFPLAPSSKSTSGGTAALGCLVKDYFPEPVTVSWNSGALTSGVHTFPAVLQSSGLYSLSSVVTVPSSSLGTQTYICNVNHKPSNTKVDKKVEPKSSDKTHTSPPSPAPELLGGSSVFLFPPKPKDTLMISRTPEVTCVVVDVSHEDPEVKFNWYVDGVEVHNAKTKPREEQYGSTYRVVSVLTVLHQDWLNGKEYKCKVSNKALPAPIEKTISKAKGQPREPQVYTLPPSRDELTKNQVSLTCLVKGFYPSDIAVEWESNGQPENNYKTTPPVLDSDGSFFLYSKLTVDKSRWQQGNVFSCSVMHEALHNHYTQKSLSLSPG

SEQ ID NO: 158 - protein, 440 aa, Artificial Sequence
  source: /note="Description of Artificial Sequence: Synthetic polypeptide"
QVQLVQSGAEVVKPGASVKLSCKASGYIFTSYYMYWVKQAPGQGLEWIGEINPSNGDTNFNEKFKSKATLTVDKSASTAYMELSSLRSEDTAVYYCTRSDGRNDMDSWGQGTLVTVSSASTKGPSVFPLAPSSKSTSGGTAALGCLVKDYFPEPVTVSWNSGALTSGVHTFPAVLQSSGLYSLSSVVTVPSSSLGTQTYICNVNHKPSNTKVDKKVTHTSPPSPAPELLGGSSVFLFPPKPKDTLMISRTPEVTCVVVDVSHEDPEVKFNWYVDGVEVHNAKTKPREEQYGSTYRVVSVLTVLHQDWLNGKEYKCKVSNKALPAPIEKTISKAKGQPREPQVYTLPPSRDELTKNQVSLTCLVKGFYPSDIAVEWESNGQPENNYKTTPPVLDSDGSFFLYSKLTVDKSRWQQGNVFSCSVMHEALHNHYTQKSLSLSPG

SEQ ID NO: 159 - protein, 447 aa, Artificial Sequence
  source: /note="Description of Artificial Sequence: Synthetic polypeptide"
QVQLVQSGAEVVKPGASVKLSCKASGYIFTSYYMYWVKQAPGQGLEWIGEINPSNGDTNFNEKFKSKATLTVDKSASTAYMELSSLRSEDTAVYYCTRSDGRNDMDSWGQGTLVTVSSASTKGPSVFPLAPSSKSTSGGTAALGCLVKDYFPEPVTVSWNSGALTSGVHTFPAVLQSSGLYSLSSVVTVPSSSLGTQTYICNVNHKPSNTKVDKKVEPKSCDKTHTCPPCPAPEAAGGPSVFLFPPKPKDTLMISRTPEVTCVVVDVSHEDPEVKFNWYVDGVEVHNAKTKPREEQYNSTYRVVSVLTVLHQDWLNGKEYKCKVSNKALPAPIEKTISKAKGQPREPQVYTLPPSRDELTKNQVSLTCLVKGFYPSDIAVEWESNGQPENNYKTTPPVLDSDGSFFLYSKLTVDKSRWQQGNVFSCSVMHEALHNHYTQKSLSLSPG

SEQ ID NO: 160 - protein, 447 aa, Artificial Sequence
  source: /note="Description of Artificial Sequence: Synthetic polypeptide"
QVQLVQSGAEVVKPGASVKLSCKASGYIFTSYYMYWVKQAPGQGLEWIGEINPSNGDTNFNEKFKSKATLTVDKSASTAYMELSSLRSEDTAVYYCTRSDGRNDMDSWGQGTLVTVSSASTKGPSVFPLAPSSKSTSGGTAALGCLVKDYFPEPVTVSWNSGALTSGVHTFPAVLQSSGLYSLSSVVTVPSSSLGTQTYICNVNHKPSNTKVDKKVEPKSCDKTHTSPPSPAPELLGGSSVFLFPPKPKDTLMISRTPEVTCVVVDVSHEDPEVKFNWYVDGVEVHNAKTKPREEQYNSTYRVVSVLTVLHQDWLNGKEYKCKVSNKALPAPIEKTISKAKGQPREPQVYTLPPSRDELTKNQVSLTCLVKGFYPSDIAVEWESNGQPENNYKTTPPVLDSDGSFFLYSKLTVDKSRWQQGNVFSCSVMHEALHNHYTQKSLSLSPG

SEQ ID NO: 161 - protein, 448 aa, Artificial Sequence
  source: /note="Description of Artificial Sequence: Synthetic polypeptide"
QVQLVQSGAEVVKPGASVKLSCKASGYIFTSYYMYWVKQAPGQGLEWIGEINPSNGDTNFNEKFKSKATLTVDKSASTAYMELSSLRSEDTAVYYCTRSDGRNDMDSWGQGTLVTVSSASTKGPSVFPLAPSSKSTSGGTAALGCLVKDYFPEPVTVSWNSGALTSGVHTFPAVLQSSGLYSLSSVVTVPSSSLGTQTYICNVNHKPSNTKVDKKVEPKSCDKTHTCPPCPAPELLGGPSVFLFPPKPKDTLMISRTPEVTCVVVDVSHEDPEVKFNWYVDGVEVHNAKTKPREEQYQSTYRVVSVLTVLHQDWLNGKEYKCKVSNKALPAPIEKTISKAKGQPREPQVYTLPPSRDELTKNQVSLTCLVKGFYPSDIAVEWESNGQPENNYKTTPPVLDSDGSFFLYSKLTVDKSRWQQGNVFSCSVMHEALHNHYTQKSLSLSPGK

SEQ ID NO: 162 - protein, 448 aa, Artificial Sequence
  source: /note="Description of Artificial Sequence: Synthetic polypeptide"
QVQLVQSGAEVVKPGASVKLSCKASGYIFTSYYMYWVKQAPGQGLEWIGEINPSNGDTNFNEKFKSKATLTVDKSASTAYMELSSLRSEDTAVYYCTRSDGRNDMDSWGQGTLVTVSSASTKGPSVFPLAPSSKSTSGGTAALGCLVKDYFPEPVTVSWNSGALTSGVHTFPAVLQSSGLYSLSSVVTVPSSSLGTQTYICNVNHKPSNTKVDKKVEPKSCDKTHTCPPCPAPELLGGPSVFLFPPKPKDTLMISRTPEVTCVVVDVSHEDPEVKFNWYVDGVEVHNAKTKPREEQYNSTYRVVSVLTVLHQDWLNGKEYKCKVSNKALPAPIEKTISKAKGQPREPQVYTLPPSRDELTKNQVSLTCLVKGFYPSDIAVEWESNGQPENNYKTTPPVLDSDGSFFLYSKLTVDKSRWQQGNVFSCSVMHEALHNHYTQKSLSLSPGK

SEQ ID NO: 163 - protein, 448 aa, Artificial Sequence
  source: /note="Description of Artificial Sequence: Synthetic polypeptide"
QVQLVQSGAEVVKPGASVKLSCKASGYIFTSYYMYWVKQAPGQGLEWIGEINPSNGDTNFNEKFKSKATLTVDKSASTAYMELSSLRSEDTAVYYCTRSDGRNDMDSWGQGTLVTVSSASTKGPSVFPLAPSSKSTSGGTAALGCLVKDYFPEPVTVSWNSGALTSGVHTFPAVLQSSGLYSLSSVVTVPSSSLGTQTYICNVNHKPSNTKVDKKVEPKSCDKTHTCPPCPAPELLGGPSVFLFPPKPKDTLMISRTPEVTCVVVDVSHEDPEVKFNWYVDGVEVHNAKTKPREEQYGSTYRVVSVLTVLHQDWLNGKEYKCKVSNKALPAPIEKTISKAKGQPREPQVYTLPPSRDELTKNQVSLTCLVKGFYPSDIAVEWESNGQPENNYKTTPPVLDSDGSFFLYSKLTVDKSRWQQGNVFSCSVMHEALHNHYTQKSLSLSPGK

SEQ ID NO: 164 - protein, 448 aa, Artificial Sequence
  source: /note="Description of Artificial Sequence: Synthetic polypeptide"
QVQLVQSGAEVVKPGASVKLSCKASGYIFTSYYMYWVKQAPGQGLEWIGEINPSNGDTNFNEKFKSKATLTVDKSASTAYMELSSLRSEDTAVYYCTRSDGRNDMDSWGQGTLVTVSSASTKGPSVFPLAPSSKSTSGGTAALGCLVKDYFPEPVTVSWNSGALTSGVHTFPAVLQSSGLYSLSSVVTVPSSSLGTQTYICNVNHKPSNTKVDKKVEPKSSDKTHTSPPSPAPELLGGSSVFLFPPKPKDTLMISRTPEVTCVVVDVSHEDPEVKFNWYVDGVEVHNAKTKPREEQYNSTYRVVSVLTVLHQDWLNGKEYKCKVSNKALPAPIEKTISKAKGQPREPQVYTLPPSRDELTKNQVSLTCLVKGFYPSDIAVEWESNGQPENNYKTTPPVLDSDGSFFLYSKLTVDKSRWQQGNVFSCSVMHEALHNHYTQKSLSLSPGK

SEQ ID NO: 165 - protein, 445 aa, Artificial Sequence
  source: /note="Description of Artificial Sequence: Synthetic polypeptide"
QVQLVQSGAEVVKPGASVKLSCKASGYIFTSYYMYWVKQAPGQGLEWIGEINPSNGDTNFNEKFKSKATLTVDKSASTAYMELSSLRSEDTAVYYCTRSDGRNDMDSWGQGTLVTVSSASTKGPSVFPLAPCSRSTSESTAALGCLVKDYFPEPVTVSWNSGALTSGVHTFPAVLQSSGLYSLSSVVTVPSSSLGTKTYTCNVDHKPSNTKVDKRVESKYGPPCPPCPAPEFAGGPSVFLFPPKPKDTLMISRTPEVTCVVVDVSQEDPEVQFNWYVDGVEVHNAKTKPREEQFNSTYRVVSVLTVLHQDWLNGKEYKCKVSNKGLPSSIEKTISKAKGQPREPQVYTLPPSQEEMTKNQVSLTCLVKGFYPSDIAVEWESNGQPENNYKTTPPVLDSDGSFFLYSRLTVDKSRWQEGNVFSCSVMHEALHNHYTQKSLSLSLGK

SEQ ID NO: 166 - protein, 445 aa, Artificial Sequence
  source: /note="Description of Artificial Sequence: Synthetic polypeptide"
QVQLVQSGAEVVKPGASVKLSCKASGYIFTSYYMYWVKQAPGQGLEWIGEINPSNGDTNFNEKFKSKATLTVDKSASTAYMELSSLRSEDTAVYYCTRSDGRNDMDSWGQGTLVTVSSASTKGPSVFPLAPCSRSTSESTAALGCLVKDYFPEPVTVSWNSGALTSGVHTFPAVLQSSGLYSLSSVVTVPSSSLGTKTYTCNVDHKPSNTKVDKRVESKYGPPCPSCPAPEFLGGPSVFLFPPKPKDTLMISRTPEVTCVVVDVSQEDPEVQFNWYVDGVEVHNAKTKPREEQFNSTYRVVSVLTVLHQDWLNGKEYKCKVSNKGLPSSIEKTISKAKGQPREPQVYTLPPSQEEMTKNQVSLTCLVKGFYPSDIAVEWESNGQPENNYKTTPPVLDSDGSFFLYSRLTVDKSRWQEGNVFSCSVMHEALHNHYTQKSLSLSLGK

SEQ ID NO: 167 - protein, 444 aa, Artificial Sequence
  source: /note="Description of Artificial Sequence: Synthetic polypeptide"
QVQLVQSGAEVVKPGASVKLSCKASGYIFTSYYMYWVKQAPGQGLEWIGEINPSNGDTNFNEKFKSKATLTVDKSASTAYMELSSLRSEDTAVYYCTRSDGRNDMDSWGQGTLVTVSSASTKGPSVFPLAPCSRSTSESTAALGCLVKDYFPEPVTVSWNSGALTSGVHTFPAVLQSSGLYSLSSVVTVTSSNFGTQTYTCNVDHKPSNTKVDKTVERKCCVECPPCPAPPVAGPSVFLFPPKPKDTLMISRTPEVTCVVVDVSHEDPEVQFNWYVDGMEVHNAKTKPREEQFNSTFRVVSVLTVVHQDWLNGKEYKCKVSNKGLPAPIEKTISKTKGQPREPQVYTLPPSREEMTKNQVSLTCLVKGFYPSDIAVEWESNGQPENNYKTTPPMLDSDGSFFLYSKLTVDKSRWQQGNVFSCSVMHEALHNHYTQKSLSLSPGK

SEQ ID NO: 168 - protein, 441 aa, Artificial Sequence
  source: /note="Description of Artificial Sequence: Synthetic polypeptide"
QVQLVQSGAEVVKPGASVKLSCKASGYIFTSYYMYWVKQAPGQGLEWIGEINPSNGDTNFNEKFKSKATLTVDKSASTAYMELSSLRSEDTAVYYCTRSDGRNDMDSWGQGTLVTVSSASTKGPSVFPLAPSSKSTSGGTAALGCLVKDYFPEPVTVSWNSGALTSGVHTFPAVLQSSGLYSLSSVVTVPSSSLGTQTYICNVNHKPSNTKVDKKVTHTSPPSPAPELLGGSSVFLFPPKPKDTLMISRTPEVTCVVVDVSHEDPEVKFNWYVDGVEVHNAKTKPREEQYNSTYRVVSVLTVLHQDWLNGKEYKCKVSNKALPAPIEKTISKAKGQPREPQVYTLPPSRDELTKNQVSLTCLVKGFYPSDIAVEWESNGQPENNYKTTPPVLDSDGSFFLYSKLTVDKSRWQQGNVFSCSVMHEALHNHYTQKSLSLSPGK

SEQ ID NO: 169 - protein, 448 aa, Artificial Sequence
  source: /note="Description of Artificial Sequence: Synthetic polypeptide"
QVQLVQSGAEVVKPGASVKLSCKASGYIFTSYYMYWVKQAPGQGLEWIGEINPSNGDTNFNEKFKSKATLTVDKSASTAYMELSSLRSEDTAVYYCTRSDGRNDMDSWGQGTLVTVSSASTKGPSVFPLAPSSKSTSGGTAALGCLVKDYFPEPVTVSWNSGALTSGVHTFPAVLQSSGLYSLSSVVTVPSSSLGTQTYICNVNHKPSNTKVDKKVEPKSSDKTHTSPPSPAPELLGGSSVFLFPPKPKDTLMISRTPEVTCVVVDVSHEDPEVKFNWYVDGVEVHNAKTKPREEQYQSTYRVVSVLTVLHQDWLNGKEYKCKVSNKALPAPIEKTISKAKGQPREPQVYTLPPSRDELTKNQVSLTCLVKGFYPSDIAVEWESNGQPENNYKTTPPVLDSDGSFFLYSKLTVDKSRWQQGNVFSCSVMHEALHNHYTQKSLSLSPGK

SEQ ID NO: 170 - protein, 441 aa, Artificial Sequence
  source: /note="Description of Artificial Sequence: Synthetic polypeptide"
QVQLVQSGAEVVKPGASVKLSCKASGYIFTSYYMYWVKQAPGQGLEWIGEINPSNGDTNFNEKFKSKATLTVDKSASTAYMELSSLRSEDTAVYYCTRSDGRNDMDSWGQGTLVTVSSASTKGPSVFPLAPSSKSTSGGTAALGCLVKDYFPEPVTVSWNSGALTSGVHTFPAVLQSSGLYSLSSVVTVPSSSLGTQTYICNVNHKPSNTKVDKKVTHTSPPSPAPELLGGSSVFLFPPKPKDTLMISRTPEVTCVVVDVSHEDPEVKFNWYVDGVEVHNAKTKPREEQYQSTYRVVSVLTVLHQDWLNGKEYKCKVSNKALPAPIEKTISKAKGQPREPQVYTLPPSRDELTKNQVSLTCLVKGFYPSDIAVEWESNGQPENNYKTTPPVLDSDGSFFLYSKLTVDKSRWQQGNVFSCSVMHEALHNHYTQKSLSLSPGK

SEQ ID NO: 171 - protein, 448 aa, Artificial Sequence
  source: /note="Description of Artificial Sequence: Synthetic polypeptide"
QVQLVQSGAEVVKPGASVKLSCKASGYIFTSYYMYWVKQAPGQGLEWIGEINPSNGDTNFNEKFKSKATLTVDKSASTAYMELSSLRSEDTAVYYCTRSDGRNDMDSWGQGTLVTVSSASTKGPSVFPLAPSSKSTSGGTAALGCLVKDYFPEPVTVSWNSGALTSGVHTFPAVLQSSGLYSLSSVVTVPSSSLGTQTYICNVNHKPSNTKVDKKVEPKSSDKTHTSPPSPAPELLGGSSVFLFPPKPKDTLMISRTPEVTCVVVDVSHEDPEVKFNWYVDGVEVHNAKTKPREEQYGSTYRVVSVLTVLHQDWLNGKEYKCKVSNKALPAPIEKTISKAKGQPREPQVYTLPPSRDELTKNQVSLTCLVKGFYPSDIAVEWESNGQPENNYKTTPPVLDSDGSFFLYSKLTVDKSRWQQGNVFSCSVMHEALHNHYTQKSLSLSPGK

SEQ ID NO: 172 - protein, 441 aa, Artificial Sequence
  source: /note="Description of Artificial Sequence: Synthetic polypeptide"
QVQLVQSGAEVVKPGASVKLSCKASGYIFTSYYMYWVKQAPGQGLEWIGEINPSNGDTNFNEKFKSKATLTVDKSASTAYMELSSLRSEDTAVYYCTRSDGRNDMDSWGQGTLVTVSSASTKGPSVFPLAPSSKSTSGGTAALGCLVKDYFPEPVTVSWNSGALTSGVHTFPAVLQSSGLYSLSSVVTVPSSSLGTQTYICNVNHKPSNTKVDKKVTHTSPPSPAPELLGGSSVFLFPPKPKDTLMISRTPEVTCVVVDVSHEDPEVKFNWYVDGVEVHNAKTKPREEQYGSTYRVVSVLTVLHQDWLNGKEYKCKVSNKALPAPIEKTISKAKGQPREPQVYTLPPSRDELTKNQVSLTCLVKGFYPSDIAVEWESNGQPENNYKTTPPVLDSDGSFFLYSKLTVDKSRWQQGNVFSCSVMHEALHNHYTQKSLSLSPGK

SEQ ID NO: 173 - protein, 448 aa, Artificial Sequence
  source: /note="Description of Artificial Sequence: Synthetic polypeptide"
QVQLVQSGAEVVKPGASVKLSCKASGYIFTSYYMYWVKQAPGQGLEWIGEINPSNGDTNFNEKFKSKATLTVDKSASTAYMELSSLRSEDTAVYYCTRSDGRNDMDSWGQGTLVTVSSASTKGPSVFPLAPSSKSTSGGTAALGCLVKDYFPEPVTVSWNSGALTSGVHTFPAVLQSSGLYSLSSVVTVPSSSLGTQTYICNVNHKPSNTKVDKKVEPKSCDKTHTCPPCPAPEAAGGPSVFLFPPKPKDTLMISRTPEVTCVVVDVSHEDPEVKFNWYVDGVEVHNAKTKPREEQYNSTYRVVSVLTVLHQDWLNGKEYKCKVSNKALPAPIEKTISKAKGQPREPQVYTLPPSRDELTKNQVSLTCLVKGFYPSDIAVEWESNGQPENNYKTTPPVLDSDGSFFLYSKLTVDKSRWQQGNVFSCSVMHEALHNHYTQKSLSLSPGK

SEQ ID NO: 174 - protein, 448 aa, Artificial Sequence
  source: /note="Description of Artificial Sequence: Synthetic polypeptide"
QVQLVQSGAEVVKPGASVKLSCKASGYIFTSYYMYWVKQAPGQGLEWIGEINPSNGDTNFNEKFKSKATLTVDKSASTAYMELSSLRSEDTAVYYCTRSDGRNDMDSWGQGTLVTVSSASTKGPSVFPLAPSSKSTSGGTAALGCLVKDYFPEPVTVSWNSGALTSGVHTFPAVLQSSGLYSLSSVVTVPSSSLGTQTYICNVNHKPSNTKVDKKVEPKSCDKTHTSPPSPAPELLGGSSVFLFPPKPKDTLMISRTPEVTCVVVDVSHEDPEVKFNWYVDGVEVHNAKTKPREEQYNSTYRVVSVLTVLHQDWLNGKEYKCKVSNKALPAPIEKTISKAKGQPREPQVYTLPPSRDELTKNQVSLTCLVKGFYPSDIAVEWESNGQPENNYKTTPPVLDSDGSFFLYSKLTVDKSRWQQGNVFSCSVMHEALHNHYTQKSLSLSPGK

SEQ ID NO: 175 - DNA, 1389 bp, Artificial Sequence
  source: /note="Description of Artificial Sequence: Synthetic polynucleotide"
atgccactgctgctgctgctgccactgctgtgggctggcgctctggctcaggtgcagctggtgcagtctggagctgaggtggtgaagccaggcgcctctgtgaagctgtcctgcaaggctagcggctacatcttcacctcctactatatgtattgggtgaagcaggctcctggacagggactggagtggatcggcgagatcaacccatctaatggcgacaccaacttcaatgagaagtttaagtccaaggctaccctgacagtggataagtccgcctctacagcctacatggagctgtccagcctgagaagcgaggacaccgccgtgtactattgcacaaggtctgatggccggaacgacatggattcctggggccagggcaccctggtgacagtgtcttccgcttctaccaagggcccttccgtgtttccactggctccaagctctaagtccaccagcggaggaacagccgctctgggctgtctggtgaaggactatttccctgagccagtgacagtgagctggaactctggcgctctgacctccggcgtgcacacatttccagccgtgctgcagtccagcggcctgtacagcctgtcttccgtggtgaccgtgccaagctcttccctgggcacccagacatatatctgcaacgtgaatcataagccctctaatacaaaggtggacaagaaggtggagcccaagtcttgtgataaaacacatacttgccccccttgtcctgcaccagaactgctgggaggacctagcgtgttcctgtttccacccaagccaaaagacaccctgatgattagtagaacccctgaggtcacatgcgtggtcgtggacgtgagccacgaggaccccgaggtgaagttcaactggtacgtggacggcgtggaggtgcacaatgctaagaccaagcccagagaggagcagtaccagagcacctatcgcgtggtgtctgtgctgacagtgctgcatcaggattggctgaacggcaaggagtataagtgcaaggtgagcaataaggctctgcccgcccctatcgagaagaccatctctaaggctaagggccagcctagggagccacaggtgtacacactgcccccttcccgggacgagctgaccaagaaccaggtgagcctgacatgtctggtgaagggcttctatcccagcgatatcgccgtggagtgggagtctaatggccagcctgagaacaattacaagaccacaccacccgtgctggactccgatggcagcttctttctgtattccaagctgaccgtggataagagccgctggcagcagggcaacgtgttttcttgttccgtgatgcacgaggccctgcacaatcattacacacagaagagcctgtctctgtcccctggc

SEQ ID NO: 176 - DNA, 1389 bp, Artificial Sequence
  source: /note="Description of Artificial Sequence: Synthetic polynucleotide"
atgcccctgctgctgctgctgcctctgctgtgggctggcgctctggctcaggtgcagctggtgcagtccggagctgaggtggtgaagccaggagcctctgtgaagctgtcctgcaaggctagcggctacatcttcaccagctactatatgtattgggtgaagcaggctccaggacagggcctggagtggatcggcgagatcaacccttctaatggcgacaccaacttcaatgagaagtttaagtccaaggctaccctgacagtggataagtccgcctctacagcctacatggagctgtccagcctgaggtctgaggacaccgccgtgtactattgcacaaggtctgatggccggaacgacatggattcctggggccagggcaccctggtgacagtgtcttccgcttctaccaagggaccatccgtgtttccactggctccaagctctaagtccaccagcggaggaacagccgctctgggctgtctggtgaaggactatttcccagagcccgtgacagtgagctggaactctggcgctctgaccagcggcgtgcacacatttccagccgtgctgcagtccagcggcctgtactctctgtcttccgtggtgaccgtgcctagctcttccctgggcacccagacatatatctgcaacgtgaatcacaagcctagcaatacaaaggtggacaagaaggtggagccaaagtcttgtgataagacccatacatgccccccttgtcctgctccagagctgctgggaggaccatccgtgttcctgtttccacccaagcccaaggacaccctgatgatctccagaacccctgaggtgacatgcgtggtggtggacgtgagccacgaggaccccgaggtgaagttcaactggtacgtggatggcgtggaggtgcataatgccaagaccaagcctagagaggagcagtacaatagcacctatcgcgtggtgtctgtgctgacagtgctgcaccaggactggctgaacggcaaggagtataagtgcaaggtgtctaataaggctctgcccgcccctatcgagaagaccatctccaaggctaagggccagcctagggagccacaggtgtacacactgcctccatcccgggacgagctgaccaagaaccaggtgagcctgacatgtctggtgaagggcttctatccaagcgatatcgccgtggagtgggagtctaatggccagcccgagaacaattacaagaccacaccccctgtgctggactccgatggcagcttctttctgtattccaagctgaccgtggataagagccgctggcagcagggcaacgtgttttcttgttccgtgatgcatgaggctctgcacaatcattacacacagaagagcctgtctctgtccccaggc

SEQ ID NO: 177 - DNA, 1389 bp, Artificial Sequence
  source: /note="Description of Artificial Sequence: Synthetic polynucleotide"
atgcccctgctgctgctgctgcctctgctgtgggctggcgctctggctcaggtgcagctggtgcagtccggagctgaggtggtgaagccaggagcctctgtgaagctgtcctgcaaggctagcggctacatcttcaccagctactatatgtattgggtgaagcaggctccaggacagggcctggagtggatcggcgagatcaacccttctaatggcgacaccaacttcaatgagaagtttaagtccaaggctaccctgacagtggataagtccgcctctacagcctacatggagctgtccagcctgaggtctgaggacaccgccgtgtactattgcacaaggtctgatggccggaacgacatggattcctggggccagggcaccctggtgacagtgtcttccgcttctaccaagggaccatccgtgtttccactggctccaagctctaagtccaccagcggaggaacagccgctctgggctgtctggtgaaggactatttcccagagcccgtgacagtgagctggaactctggcgctctgaccagcggcgtgcacacatttccagccgtgctgcagtccagcggcctgtactctctgtcttccgtggtgaccgtgcctagctcttccctgggcacccagacatatatctgcaacgtgaatcacaagcctagcaatacaaaggtggacaagaaggtggagccaaagtcttgtgataagacccatacatgccccccttgtcctgctccagagctgctgggaggaccatccgtgttcctgtttccacccaagcccaaggacaccctgatgatctccagaacccctgaggtgacatgcgtggtggtggacgtgagccacgaggaccccgaggtgaagttcaactggtacgtggatggcgtggaggtgcataatgccaagaccaagcctagagaggagcagtacggcagcacctatcgcgtggtgtctgtgctgacagtgctgcaccaggactggctgaacggcaaggagtataagtgcaaggtgtctaataaggctctgcccgcccctatcgagaagaccatctccaaggctaagggccagcctagggagccacaggtgtacacactgcctccatcccgggacgagctgaccaagaaccaggtgagcctgacatgtctggtgaagggcttctatccaagcgatatcgccgtggagtgggagtctaatggccagcccgagaacaattacaagaccacaccccctgtgctggactccgatggcagcttctttctgtattccaagctgaccgtggataagagccgctggcagcagggcaacgtgttttcttgttccgtgatgcatgaggctctgcacaatcattacacacagaagagcctgtctctgtccccaggc

SEQ ID NO: 178 - DNA, 1389 bp, Artificial Sequence
  source: /note="Description of Artificial Sequence: Synthetic polynucleotide"
atgcccctgctgctgctgctgcctctgctgtgggctggcgctctggctcaggtgcagctggtgcagagcggagctgaggtggtgaagccaggagcctctgtgaagctgtcctgcaaggctagcggctacatcttcacctcttactatatgtattgggtgaagcaggctccaggacagggcctggagtggatcggcgagatcaacccttctaatggcgacaccaacttcaatgagaagtttaagtccaaggctaccctgacagtggataagtctgcttccacagcctacatggagctgtccagcctgaggtccgaggacaccgccgtgtactattgcacaaggtctgatggccggaacgacatggattcctggggccagggcaccctggtgacagtgtcttccgcttctaccaagggaccatccgtgtttccactggctccaagctctaagagcacctctggaggaacagccgctctgggatgtctggtgaaggactatttcccagagcccgtgacagtgtcttggaactccggcgctctgacctctggcgtgcacacatttcctgccgtgctgcagtccagcggcctgtactccctgtcttccgtggtgaccgtgccaagctcttccctgggcacccagacatatatctgcaacgtgaatcacaagccttccaatacaaaggtggacaagaaggtggagccaaagagctctgataagacccatacaagccccccttctcctgctccagagctgctgggaggctccagcgtgttcctgtttccacccaagccaaaggacaccctgatgatcagcagaacccccgaggtgacatgcgtggtggtggacgtgtctcacgaggaccccgaggtgaagttcaactggtacgtggatggcgtggaggtgcataatgccaagaccaagcctagagaggagcagtacaatagcacctatcgcgtggtgtctgtgctgacagtgctgcaccaggactggctgaacggcaaggagtataagtgcaaggtgtccaataaggctctgcccgcccctatcgagaagaccatcagcaaggctaagggccagcctagggagccacaggtgtacacactgcctccatcccgggacgagctgaccaagaaccaggtgagcctgacatgtctggtgaagggcttctatccaagcgatatcgccgtggagtgggagtctaatggccagcccgagaacaattacaagaccacaccccctgtgctggactccgatggcagcttctttctgtattccaagctgaccgtggataagagccgctggcagcagggcaacgtgttttcctgtagcgtgatgcatgaggctctgcacaatcattacacacagaagtctctgtccctgagccctggc

SEQ ID NO: 179 - DNA, 1380 bp, Artificial Sequence
  source: /note="Description of Artificial Sequence: Synthetic polynucleotide"
atgcccctgctgctgctgctgcctctgctgtgggctggcgctctggctcaggtgcagctggtgcagtctggagctgaggtggtgaagcctggagctagcgtgaagctgtcttgcaaggcttccggctacatcttcacctcctactatatgtattgggtgaagcaggctcctggacagggcctggagtggatcggcgagatcaacccatccaatggcgacacaaacttcaatgagaagtttaagagcaaggctaccctgacagtggataagtccgcctctaccgcctacatggagctgtccagcctgaggagcgaggacacagccgtgtactattgtaccaggagcgatggccggaacgacatggattcttggggccagggcacactggtgaccgtgtcttccgctagcacaaagggaccatccgtgttcccactggctccatgctccaggagcacatctgagtccaccgccgctctgggctgtctggtgaaggactatttccctgagccagtgaccgtgtcctggaatagcggcgctctgacatccggagtgcacacctttccagccgtgctgcagagctctggcctgtacagcctgtccagcgtggtgacagtgccttcttccagcctgggcaccaagacatatacctgcaacgtggaccataagccatctaataccaaggtggataagagagtggagtccaagtacggaccaccttgcccaccatgtccagctcctgagttcgctggaggaccatccgtgttcctgtttcctccaaagcccaaggacaccctgatgatctctcgcacaccagaggtgacctgcgtggtggtggacgtgtcccaggaggaccccgaggtgcagttcaactggtacgtggatggcgtggaggtgcacaatgctaagaccaagcccagggaggagcagtttaactccacataccgggtggtgagcgtgctgaccgtgctgcatcaggattggctgaacggcaaggagtataagtgcaaggtgagcaataagggcctgccttcttccatcgagaagacaatctctaaggctaagggccagcctcgggagccacaggtgtacaccctgccccctagccaggaggagatgacaaagaaccaggtgtctctgacctgtctggtgaagggcttctatccctccgacatcgccgtggagtgggagagcaatggccagcctgagaacaattacaagaccacaccacccgtgctggactctgatggctccttctttctgtattctagactgaccgtcgataagtcccgctggcaggagggcaacgtgtttagctgctctgtgatgcacgaggccctgcacaatcattacacccagaagtccctgagcctgtctctgggc

SEQ ID NO: 180 - DNA, 1341 bp, Artificial Sequence
  source: /note="Description of Artificial Sequence: Synthetic polynucleotide"
caggtgcagctggtgcagtctggagctgaggtggtgaagccaggcgcctctgtgaagctgtcctgcaaggctagcggctacatcttcacctcctactatatgtattgggtgaagcaggctcctggacagggactggagtggatcggcgagatcaacccatctaatggcgacaccaacttcaatgagaagtttaagtccaaggctaccctgacagtggataagtccgcctctacagcctacatggagctgtccagcctgagaagcgaggacaccgccgtgtactattgcacaaggtctgatggccggaacgacatggattcctggggccagggcaccctggtgacagtgtcttccgcttctaccaagggcccttccgtgtttccactggctccaagctctaagtccaccagcggaggaacagccgctctgggctgtctggtgaaggactatttccctgagccagtgacagtgagctggaactctggcgctctgacctccggcgtgcacacatttccagccgtgctgcagtccagcggcctgtacagcctgtcttccgtggtgaccgtgccaagctcttccctgggcacccagacatatatctgcaacgtgaatcataagccctctaatacaaaggtggacaagaaggtggagcccaagtcttgtgataaaacacatacttgccccccttgtcctgcaccagaactgctgggaggacctagcgtgttcctgtttccacccaagccaaaagacaccctgatgattagtagaacccctgaggtcacatgcgtggtcgtggacgtgagccacgaggaccccgaggtgaagttcaactggtacgtggacggcgtggaggtgcacaatgctaagaccaagcccagagaggagcagtaccagagcacctatcgcgtggtgtctgtgctgacagtgctgcatcaggattggctgaacggcaaggagtataagtgcaaggtgagcaataaggctctgcccgcccctatcgagaagaccatctctaaggctaagggccagcctagggagccacaggtgtacacactgcccccttcccgggacgagctgaccaagaaccaggtgagcctgacatgtctggtgaagggcttctatcccagcgatatcgccgtggagtgggagtctaatggccagcctgagaacaattacaagaccacaccacccgtgctggactccgatggcagcttctttctgtattccaagctgaccgtggataagagccgctggcagcagggcaacgtgttttcttgttccgtgatgcacgaggccctgcacaatcattacacacagaagagcctgtctctgtcccctggc

SEQ ID NO: 181 - DNA, 1341 bp, Artificial Sequence
  source: /note="Description of Artificial Sequence: Synthetic polynucleotide"
caggtgcagctggtgcagtccggagctgaggtggtgaagccaggagcctctgtgaagctgtcctgcaaggctagcggctacatcttcaccagctactatatgtattgggtgaagcaggctccaggacagggcctggagtggatcggcgagatcaacccttctaatggcgacaccaacttcaatgagaagtttaagtccaaggctaccctgacagtggataagtccgcctctacagcctacatggagctgtccagcctgaggtctgaggacaccgccgtgtactattgcacaaggtctgatggccggaacgacatggattcctggggccagggcaccctggtgacagtgtcttccgcttctaccaagggaccatccgtgtttccactggctccaagctctaagtccaccagcggaggaacagccgctctgggctgtctggtgaaggactatttcccagagcccgtgacagtgagctggaactctggcgctctgaccagcggcgtgcacacatttccagccgtgctgcagtccagcggcctgtactctctgtcttccgtggtgaccgtgcctagctcttccctgggcacccagacatatatctgcaacgtgaatcacaagcctagcaatacaaaggtggacaagaaggtggagccaaagtcttgtgataagacccatacatgccccccttgtcctgctccagagctgctgggaggaccatccgtgttcctgtttccacccaagcccaaggacaccctgatgatctccagaacccctgaggtgacatgcgtggtggtggacgtgagccacgaggaccccgaggtgaagttcaactggtacgtggatggcgtggaggtgcataatgccaagaccaagcctagagaggagcagtacaatagcacctatcgcgtggtgtctgtgctgacagtgctgcaccaggactggctgaacggcaaggagtataagtgcaaggtgtctaataaggctctgcccgcccctatcgagaagaccatctccaaggctaagggccagcctagggagccacaggtgtacacactgcctccatcccgggacgagctgaccaagaaccaggtgagcctgacatgtctggtgaagggcttctatccaagcgatatcgccgtggagtgggagtctaatggccagcccgagaacaattacaagaccacaccccctgtgctggactccgatggcagcttctttctgtattccaagctgaccgtggataagagccgctggcagcagggcaacgtgttttcttgttccgtgatgcatgaggctctgcacaatcattacacacagaagagcctgtctctgtccccaggc

SEQ ID NO: 182 - DNA, 1341 bp, Artificial Sequence
  source: /note="Description of Artificial Sequence: Synthetic polynucleotide"
caggtgcagctggtgcagtccggagctgaggtggtgaagccaggagcctctgtgaagctgtcctgcaaggctagcggctacatcttcaccagctactatatgtattgggtgaagcaggctccaggacagggcctggagtggatcggcgagatcaacccttctaatggcgacaccaacttcaatgagaagtttaagtccaaggctaccctgacagtggataagtccgcctctacagcctacatggagctgtccagcctgaggtctgaggacaccgccgtgtactattgcacaaggtctgatggccggaacgacatggattcctggggccagggcaccctggtgacagtgtcttccgcttctaccaagggaccatccgtgtttccactggctccaagctctaagtccaccagcggaggaacagccgctctgggctgtctggtgaaggactatttcccagagcccgtgacagtgagctggaactctggcgctctgaccagcggcgtgcacacatttccagccgtgctgcagtccagcggcctgtactctctgtcttccgtggtgaccgtgcctagctcttccctgggcacccagacatatatctgcaacgtgaatcacaagcctagcaatacaaaggtggacaagaaggtggagccaaagtcttgtgataagacccatacatgccccccttgtcctgctccagagctgctgggaggaccatccgtgttcctgtttccacccaagcccaaggacaccctgatgatctccagaacccctgaggtgacatgcgtggtggtggacgtgagccacgaggaccccgaggtgaagttcaactggtacgtggatggcgtggaggtgcataatgccaagaccaagcctagagaggagcagtacggcagcacctatcgcgtggtgtctgtgctgacagtgctgcaccaggactggctgaacggcaaggagtataagtgcaaggtgtctaataaggctctgcccgcccctatcgagaagaccatctccaaggctaagggccagcctagggagccacaggtgtacacactgcctccatcccgggacgagctgaccaagaaccaggtgagcctgacatgtctggtgaagggcttctatccaagcgatatcgccgtggagtgggagtctaatggccagcccgagaacaattacaagaccacaccccctgtgctggactccgatggcagcttctttctgtattccaagctgaccgtggataagagccgctggcagcagggcaacgtgttttcttgttccgtgatgcatgaggctctgcacaatcattacacacagaagagcctgtctctgtccccaggc

SEQ ID NO: 183 - DNA, 1341 bp, Artificial Sequence
  source: /note="Description of Artificial Sequence: Synthetic polynucleotide"
caggtgcagctggtgcagagcggagctgaggtggtgaagccaggagcctctgtgaagctgtcctgcaaggctagcggctacatcttcacctcttactatatgtattgggtgaagcaggctccaggacagggcctggagtggatcggcgagatcaacccttctaatggcgacaccaacttcaatgagaagtttaagtccaaggctaccctgacagtggataagtctgcttccacagcctacatggagctgtccagcctgaggtccgaggacaccgccgtgtactattgcacaaggtctgatggccggaacgacatggattcctggggccagggcaccctggtgacagtgtcttccgcttctaccaagggaccatccgtgtttccactggctccaagctctaagagcacctctggaggaacagccgctctgggatgtctggtgaaggactatttcccagagcccgtgacagtgtcttggaactccggcgctctgacctctggcgtgcacacatttcctgccgtgctgcagtccagcggcctgtactccctgtcttccgtggtgaccgtgccaagctcttccctgggcacccagacatatatctgcaacgtgaatcacaagccttccaatacaaaggtggacaagaaggtggagccaaagagctctgataagacccatacaagccccccttctcctgctccagagctgctgggaggctccagcgtgttcctgtttccacccaagccaaaggacaccctgatgatcagcagaacccccgaggtgacatgcgtggtggtggacgtgtctcacgaggaccccgaggtgaagttcaactggtacgtggatggcgtggaggtgcataatgccaagaccaagcctagagaggagcagtacaatagcacctatcgcgtggtgtctgtgctgacagtgctgcaccaggactggctgaacggcaaggagtataagtgcaaggtgtccaataaggctctgcccgcccctatcgagaagaccatcagcaaggctaagggccagcctagggagccacaggtgtacacactgcctccatcccgggacgagctgaccaagaaccaggtgagcctgacatgtctggtgaagggcttctatccaagcgatatcgccgtggagtgggagtctaatggccagcccgagaacaattacaagaccacaccccctgtgctggactccgatggcagcttctttctgtattccaagctgaccgtggataagagccgctggcagcagggcaacgtgttttcctgtagcgtgatgcatgaggctctgcacaatcattacacacagaagtctctgtccctgagccctggc

SEQ ID NO: 184 - DNA, 1332 bp, Artificial Sequence
  source: /note="Description of Artificial Sequence: Synthetic polynucleotide"
caggtgcagctggtgcagtctggagctgaggtggtgaagcctggagctagcgtgaagctgtcttgcaaggcttccggctacatcttcacctcctactatatgtattgggtgaagcaggctcctggacagggcctggagtggatcggcgagatcaacccatccaatggcgacacaaacttcaatgagaagtttaagagcaaggctaccctgacagtggataagtccgcctctaccgcctacatggagctgtccagcctgaggagcgaggacacagccgtgtactattgtaccaggagcgatggccggaacgacatggattcttggggccagggcacactggtgaccgtgtcttccgctagcacaaagggaccatccgtgttcccactggctccatgctccaggagcacatctgagtccaccgccgctctgggctgtctggtgaaggactatttccctgagccagtgaccgtgtcctggaatagcggcgctctgacatccggagtgcacacctttccagccgtgctgcagagctctggcctgtacagcctgtccagcgtggtgacagtgccttcttccagcctgggcaccaagacatatacctgcaacgtggaccataagccatctaataccaaggtggataagagagtggagtccaagtacggaccaccttgcccaccatgtccagctcctgagttcgctggaggaccatccgtgttcctgtttcctccaaagcccaaggacaccctgatgatctctcgcacaccagaggtgacctgcgtggtggtggacgtgtcccaggaggaccccgaggtgcagttcaactggtacgtggatggcgtggaggtgcacaatgctaagaccaagcccagggaggagcagtttaactccacataccgggtggtgagcgtgctgaccgtgctgcatcaggattggctgaacggcaaggagtataagtgcaaggtgagcaataagggcctgccttcttccatcgagaagacaatctctaaggctaagggccagcctcgggagccacaggtgtacaccctgccccctagccaggaggagatgacaaagaaccaggtgtctctgacctgtctggtgaagggcttctatccctccgacatcgccgtggagtgggagagcaatggccagcctgagaacaattacaagaccacaccacccgtgctggactctgatggctccttctttctgtattctagactgaccgtcgataagtcccgctggcaggagggcaacgtgtttagctgctctgtgatgcacgaggccctgcacaatcattacacccagaagtccctgagcctgtctctgggc

SEQ ID NO: 185 - DNA, 1344 bp, Artificial Sequence
  source: /note="Description of Artificial Sequence: Synthetic polynucleotide"
caggtgcagctggtgcagtctggagctgaggtggtgaagccaggcgcctctgtgaagctgtcctgcaaggctagcggctacatcttcacctcctactatatgtattgggtgaagcaggctcctggacagggactggagtggatcggcgagatcaacccatctaatggcgacaccaacttcaatgagaagtttaagtccaaggctaccctgacagtggataagtccgcctctacagcctacatggagctgtccagcctgagaagcgaggacaccgccgtgtactattgcacaaggtctgatggccggaacgacatggattcctggggccagggcaccctggtgacagtgtcttccgcttctaccaagggcccttccgtgtttccactggctccaagctctaagtccaccagcggaggaacagccgctctgggctgtctggtgaaggactatttccctgagccagtgacagtgagctggaactctggcgctctgacctccggcgtgcacacatttccagccgtgctgcagtccagcggcctgtacagcctgtcttccgtggtgaccgtgccaagctcttccctgggcacccagacatatatctgcaacgtgaatcataagccctctaatacaaaggtggacaagaaggtggagcccaagtcttgtgataaaacacatacttgccccccttgtcctgcaccagaactgctgggaggacctagcgtgttcctgtttccacccaagccaaaagacaccctgatgattagtagaacccctgaggtcacatgcgtggtcgtggacgtgagccacgaggaccccgaggtgaagttcaactggtacgtggacggcgtggaggtgcacaatgctaagaccaagcccagagaggagcagtaccagagcacctatcgcgtggtgtctgtgctgacagtgctgcatcaggattggctgaacggcaaggagtataagtgcaaggtgagcaataaggctctgcccgcccctatcgagaagaccatctctaaggctaagggccagcctagggagccacaggtgtacacactgcccccttcccgggacgagctgaccaagaaccaggtgagcctgacatgtctggtgaagggcttctatcccagcgatatcgccgtggagtgggagtctaatggccagcctgagaacaattacaagaccacaccacccgtgctggactccgatggcagcttctttctgtattccaagctgaccgtggataagagccgctggcagcagggcaacgtgttttcttgttccgtgatgcacgaggccctgcacaatcattacacacagaagagcctgtctctgtcccctggcaag

SEQ ID NO: 186 - DNA, 1344 bp, Artificial Sequence
  source: /note="Description of Artificial Sequence: Synthetic polynucleotide"
caggtgcagctggtgcagtccggagctgaggtggtgaagccaggagcctctgtgaagctgtcctgcaaggctagcggctacatcttcaccagctactatatgtattgggtgaagcaggctccaggacagggcctggagtggatcggcgagatcaacccttctaatggcgacaccaacttcaatgagaagtttaagtccaaggctaccctgacagtggataagtccgcctctacagcctacatggagctgtccagcctgaggtctgaggacaccgccgtgtactattgcacaaggtctgatggccggaacgacatggattcctggggccagggcaccctggtgacagtgtcttccgcttctaccaagggaccatccgtgtttccactggctccaagctctaagtccaccagcggaggaacagccgctctgggctgtctggtgaaggactatttcccagagcccgtgacagtgagctggaactctggcgctctgaccagcggcgtgcacacatttccagccgtgctgcagtccagcggcctgtactctctgtcttccgtggtgaccgtgcctagctcttccctgggcacccagacatatatctgcaacgtgaatcacaagcctagcaatacaaaggtggacaagaaggtggagccaaagtcttgtgataagacccatacatgccccccttgtcctgctccagagctgctgggaggaccatccgtgttcctgtttccacccaagcccaaggacaccctgatgatctccagaacccctgaggtgacatgcgtggtggtggacgtgagccacgaggaccccgaggtgaagttcaactggtacgtggatggcgtggaggtgcataatgccaagaccaagcctagagaggagcagtacaatagcacctatcgcgtggtgtctgtgctgacagtgctgcaccaggactggctgaacggcaaggagtataagtgcaaggtgtctaataaggctctgcccgcccctatcgagaagaccatctccaaggctaagggccagcctagggagccacaggtgtacacactgcctccatcccgggacgagctgaccaagaaccaggtgagcctgacatgtctggtgaagggcttctatccaagcgatatcgccgtggagtgggagtctaatggccagcccgagaacaattacaagaccacaccccctgtgctggactccgatggcagcttctttctgtattccaagctgaccgtggataagagccgctggcagcagggcaacgtgttttcttgttccgtgatgcatgaggctctgcacaatcattacacacagaagagcctgtctctgtccccaggcaag

SEQ ID NO: 187 - DNA, 1344 bp, Artificial Sequence
  source: /note="Description of Artificial Sequence: Synthetic polynucleotide"
caggtgcagctggtgcagtccggagctgaggtggtgaagccaggagcctctgtgaagctgtcctgcaaggctagcggctacatcttcaccagctactatatgtattgggtgaagcaggctccaggacagggcctggagtggatcggcgagatcaacccttctaatggcgacaccaacttcaatgagaagtttaagtccaaggctaccctgacagtggataagtccgcctctacagcctacatggagctgtccagcctgaggtctgaggacaccgccgtgtactattgcacaaggtctgatggccggaacgacatggattcctggggccagggcaccctggtgacagtgtcttccgcttctaccaagggaccatccgtgtttccactggctccaagctctaagtccaccagcggaggaacagccgctctgggctgtctggtgaaggactatttcccagagcccgtgacagtgagctggaactctggcgctctgaccagcggcgtgcacacatttccagccgtgctgcagtccagcggcctgtactctctgtcttccgtggtgaccgtgcctagctcttccctgggcacccagacatatatctgcaacgtgaatcacaagcctagcaatacaaaggtggacaagaaggtggagccaaagtcttgtgataagacccatacatgccccccttgtcctgctccagagctgctgggaggaccatccgtgttcctgtttccacccaagcccaaggacaccctgatgatctccagaacccctgaggtgacatgcgtggtggtggacgtgagccacgaggaccccgaggtgaagttcaactggtacgtggatggcgtggaggtgcataatgccaagaccaagcctagagaggagcagtacggcagcacctatcgcgtggtgtctgtgctgacagtgctgcaccaggactggctgaacggcaaggagtataagtgcaaggtgtctaataaggctctgcccgcccctatcgagaagaccatctccaaggctaagggccagcctagggagccacaggtgtacacactgcctccatcccgggacgagctgaccaagaaccaggtgagcctgacatgtctggtgaagggcttctatccaagcgatatcgccgtggagtgggagtctaatggccagcccgagaacaattacaagaccacaccccctgtgctggactccgatggcagcttctttctgtattccaagctgaccgtggataagagccgctggcagcagggcaacgtgttttcttgttccgtgatgcatgaggctctgcacaatcattacacacagaagagcctgtctctgtccccaggcaag

SEQ ID NO: 188 - DNA, 1344 bp, Artificial Sequence
  source: /note="Description of Artificial Sequence: Synthetic polynucleotide"
caggtgcagctggtgcagagcggagctgaggtggtgaagccaggagcctctgtgaagctgtcctgcaaggctagcggctacatcttcacctcttactatatgtattgggtgaagcaggctccaggacagggcctggagtggatcggcgagatcaacccttctaatggcgacaccaacttcaatgagaagtttaagtccaaggctaccctgacagtggataagtctgcttccacagcctacatggagctgtccagcctgaggtccgaggacaccgccgtgtactattgcacaaggtctgatggccggaacgacatggattcctggggccagggcaccctggtgacagtgtcttccgcttctaccaagggaccatccgtgtttccactggctccaagctctaagagcacctctggaggaacagccgctctgggatgtctggtgaaggactatttcccagagcccgtgacagtgtcttggaactccggcgctctgacctctggcgtgcacacatttcctgccgtgctgcagtccagcggcctgtactccctgtcttccgtggtgaccgtgccaagctcttccctgggcacccagacatatatctgcaacgtgaatcacaagccttccaatacaaaggtggacaagaaggtggagccaaagagctctgataagacccatacaagccccccttctcctgctccagagctgctgggaggctccagcgtgttcctgtttccacccaagccaaaggacaccctgatgatcagcagaacccccgaggtgacatgcgtggtggtggacgtgtctcacgaggaccccgaggtgaagttcaactggtacgtggatggcgtggaggtgcataatgccaagaccaagcctagagaggagcagtacaatagcacctatcgcgtggtgtctgtgctgacagtgctgcaccaggactggctgaacggcaaggagtataagtgcaaggtgtccaataaggctctgcccgcccctatcgagaagaccatcagcaaggctaagggccagcctagggagccacaggtgtacacactgcctccatcccgggacgagctgaccaagaaccaggtgagcctgacatgtctggtgaagggcttctatccaagcgatatcgccgtggagtgggagtctaatggccagcccgagaacaattacaagaccacaccccctgtgctggactccgatggcagcttctttctgtattccaagctgaccgtggataagagccgctggcagcagggcaacgtgttttcctgtagcgtgatgcatgaggctctgcacaatcattacacacagaagtctctgtccctgagccctggcaag

SEQ ID NO: 189 - DNA, 1335 bp, Artificial Sequence
  source: /note="Description of Artificial Sequence: Synthetic polynucleotide"
caggtgcagctggtgcagtctggagctgaggtggtgaagcctggagctagcgtgaagctgtcttgcaaggcttccggctacatcttcacctcctactatatgtattgggtgaagcaggctcctggacagggcctggagtggatcggcgagatcaacccatccaatggcgacacaaacttcaatgagaagtttaagagcaaggctaccctgacagtggataagtccgcctctaccgcctacatggagctgtccagcctgaggagcgaggacacagccgtgtactattgtaccaggagcgatggccggaacgacatggattcttggggccagggcacactggtgaccgtgtcttccgctagcacaaagggaccatccgtgttcccactggctccatgctccaggagcacatctgagtccaccgccgctctgggctgtctggtgaaggactatttccctgagccagtgaccgtgtcctggaatagcggcgctctgacatccggagtgcacacctttccagccgtgctgcagagctctggcctgtacagcctgtccagcgtggtgacagtgccttcttccagcctgggcaccaagacatatacctgcaacgtggaccataagccatctaataccaaggtggataagagagtggagtccaagtacggaccaccttgcccaccatgtccagctcctgagttcgctggaggaccatccgtgttcctgtttcctccaaagcccaaggacaccctgatgatctctcgcacaccagaggtgacctgcgtggtggtggacgtgtcccaggaggaccccgaggtgcagttcaactggtacgtggatggcgtggaggtgcacaatgctaagaccaagcccagggaggagcagtttaactccacataccgggtggtgagcgtgctgaccgtgctgcatcaggattggctgaacggcaaggagtataagtgcaaggtgagcaataagggcctgccttcttccatcgagaagacaatctctaaggctaagggccagcctcgggagccacaggtgtacaccctgccccctagccaggaggagatgacaaagaaccaggtgtctctgacctgtctggtgaagggcttctatccctccgacatcgccgtggagtgggagagcaatggccagcctgagaacaattacaagaccacaccacccgtgctggactctgatggctccttctttctgtattctagactgaccgtcgataagtcccgctggcaggagggcaacgtgtttagctgctctgtgatgcacgaggccctgcacaatcattacacccagaagtccctgagcctgtctctgggcaag

SEQ ID NO: 190 - DNA, 1392 bp, Artificial Sequence
  source: /note="Description of Artificial Sequence: Synthetic polynucleotide"
atgccactgctgctgctgctgccactgctgtgggctggcgctctggctcaggtgcagctggtgcagtctggagctgaggtggtgaagccaggcgcctctgtgaagctgtcctgcaaggctagcggctacatcttcacctcctactatatgtattgggtgaagcaggctcctggacagggactggagtggatcggcgagatcaacccatctaatggcgacaccaacttcaatgagaagtttaagtccaaggctaccctgacagtggataagtccgcctctacagcctacatggagctgtccagcctgagaagcgaggacaccgccgtgtactattgcacaaggtctgatggccggaacgacatggattcctggggccagggcaccctggtgacagtgtcttccgcttctaccaagggcccttccgtgtttccactggctccaagctctaagtccaccagcggaggaacagccgctctgggctgtctggtgaaggactatttccctgagccagtgacagtgagctggaactctggcgctctgacctccggcgtgcacacatttccagccgtgctgcagtccagcggcctgtacagcctgtcttccgtggtgaccgtgccaagctcttccctgggcacccagacatatatctgcaacgtgaatcataagccctctaatacaaaggtggacaagaaggtggagcccaagtcttgtgataaaacacatacttgccccccttgtcctgcaccagaactgctgggaggacctagcgtgttcctgtttccacccaagccaaaagacaccctgatgattagtagaacccctgaggtcacatgcgtggtcgtggacgtgagccacgaggaccccgaggtgaagttcaactggtacgtggacggcgtggaggtgcacaatgctaagaccaagcccagagaggagcagtaccagagcacctatcgcgtggtgtctgtgctgacagtgctgcatcaggattggctgaacggcaaggagtataagtgcaaggtgagcaataaggctctgcccgcccctatcgagaagaccatctctaaggctaagggccagcctagggagccacaggtgtacacactgcccccttcccgggacgagctgaccaagaaccaggtgagcctgacatgtctggtgaagggcttctatcccagcgatatcgccgtggagtgggagtctaatggccagcctgagaacaattacaagaccacaccacccgtgctggactccgatggcagcttctttctgtattccaagctgaccgtggataagagccgctggcagcagggcaacgtgttttcttgttccgtgatgcacgaggccctgcacaatcattacacacagaagagcctgtctctgtcccctggcaag

SEQ ID NO: 191 - DNA, 1392 bp, Artificial Sequence
  source: /note="Description of Artificial Sequence: Synthetic polynucleotide"
atgcccctgctgctgctgctgcctctgctgtgggctggcgctctggctcaggtgcagctggtgcagtccggagctgaggtggtgaagccaggagcctctgtgaagctgtcctgcaaggctagcggctacatcttcaccagctactatatgtattgggtgaagcaggctccaggacagggcctggagtggatcggcgagatcaacccttctaatggcgacaccaacttcaatgagaagtttaagtccaaggctaccctgacagtggataagtccgcctctacagcctacatggagctgtccagcctgaggtctgaggacaccgccgtgtactattgcacaaggtctgatggccggaacgacatggattcctggggccagggcaccctggtgacagtgtcttccgcttctaccaagggaccatccgtgtttccactggctccaagctctaagtccaccagcggaggaacagccgctctgggctgtctggtgaaggactatttcccagagcccgtgacagtgagctggaactctggcgctctgaccagcggcgtgcacacatttccagccgtgctgcagtccagcggcctgtactctctgtcttccgtggtgaccgtgcctagctcttccctgggcacccagacatatatctgcaacgtgaatcacaagcctagcaatacaaaggtggacaagaaggtggagccaaagtcttgtgataagacccatacatgccccccttgtcctgctccagagctgctgggaggaccatccgtgttcctgtttccacccaagcccaaggacaccctgatgatctccagaacccctgaggtgacatgcgtggtggtggacgtgagccacgaggaccccgaggtgaagttcaactggtacgtggatggcgtggaggtgcataatgccaagaccaagcctagagaggagcagtacaatagcacctatcgcgtggtgtctgtgctgacagtgctgcaccaggactggctgaacggcaaggagtataagtgcaaggtgtctaataaggctctgcccgcccctatcgagaagaccatctccaaggctaagggccagcctagggagccacaggtgtacacactgcctccatcccgggacgagctgaccaagaaccaggtgagcctgacatgtctggtgaagggcttctatccaagcgatatcgccgtggagtgggagtctaatggccagcccgagaacaattacaagaccacaccccctgtgctggactccgatggcagcttctttctgtattccaagctgaccgtggataagagccgctggcagcagggcaacgtgttttcttgttccgtgatgcatgaggctctgcacaatcattacacacagaagagcctgtctctgtccccaggcaag

SEQ ID NO: 192 - DNA, 1392 bp, Artificial Sequence
  source: /note="Description of Artificial Sequence: Synthetic polynucleotide"
atgcccctgctgctgctgctgcctctgctgtgggctggcgctctggctcaggtgcagctggtgcagtccggagctgaggtggtgaagccaggagcctctgtgaagctgtcctgcaaggctagcggctacatcttcaccagctactatatgtattgggtgaagcaggctccaggacagggcctggagtggatcggcgagatcaacccttctaatggcgacaccaacttcaatgagaagtttaagtccaaggctaccctgacagtggataagtccgcctctacagcctacatggagctgtccagcctgaggtctgaggacaccgccgtgtactattgcacaaggtctgatggccggaacgacatggattcctggggccagggcaccctggtgacagtgtcttccgcttctaccaagggaccatccgtgtttccactggctccaagctctaagtccaccagcggaggaacagccgctctgggctgtctggtgaaggactatttcccagagcccgtgacagtgagctggaactctggcgctctgaccagcggcgtgcacacatttccagccgtgctgcagtccagcggcctgtactctctgtcttccgtggtgaccgtgcctagctcttccctgggcacccagacatatatctgcaacgtgaatcacaagcctagcaatacaaaggtggacaagaaggtggagccaaagtcttgtgataagacccatacatgccccccttgtcctgctccagagctgctgggaggaccatccgtgttcctgtttccacccaagcccaaggacaccctgatgatctccagaacccctgaggtgacatgcgtggtggtggacgtgagccacgaggaccccgaggtgaagttcaactggtacgtggatggcgtggaggtgcataatgccaagaccaagcctagagaggagcagtacggcagcacctatcgcgtggtgtctgtgctgacagtgctgcaccaggactggctgaacggcaaggagtataagtgcaaggtgtctaataaggctctgcccgcccctatcgagaagaccatctccaaggctaagggccagcctagggagccacaggtgtacacactgcctccatcccgggacgagctgaccaagaaccaggtgagcctgacatgtctggtgaagggcttctatccaagcgatatcgccgtggagtgggagtctaatggccagcccgagaacaattacaagaccacaccccctgtgctggactccgatggcagcttctttctgtattccaagctgaccgtggataagagccgctggcagcagggcaacgtgttttcttgttccgtgatgcatgaggctctgcacaatcattacacacagaagagcctgtctctgtccccaggcaag

SEQ ID NO: 193 - DNA, 1392 bp, Artificial Sequence
  source: /note="Description of Artificial Sequence: Synthetic polynucleotide"
atgcccctgctgctgctgctgcctctgctgtgggctggcgctctggctcaggtgcagctggtgcagagcggagctgaggtggtgaagccaggagcctctgtgaagctgtcctgcaaggctagcggctacatcttcacctcttactatatgtattgggtgaagcaggctccaggacagggcctggagtggatcggcgagatcaacccttctaatggcgacaccaacttcaatgagaagtttaagtccaaggctaccctgacagtggataagtctgcttccacagcctacatggagctgtccagcctgaggtccgaggacaccgccgtgtactattgcacaaggtctgatggccggaacgacatggattcctggggccagggcaccctggtgacagtgtcttccgcttctaccaagggaccatccgtgtttccactggctccaagctctaagagcacctctggaggaacagccgctctgggatgtctggtgaaggactatttcccagagcccgtgacagtgtcttggaactccggcgctctgacctctggcgtgcacacatttcctgccgtgctgcagtccagcggcctgtactccctgtcttccgtggtgaccgtgccaagctcttccctgggcacccagacatatatctgcaacgtgaatcacaagccttccaatacaaaggtggacaagaaggtggagccaaagagctctgataagacccatacaagccccccttctcctgctccagagctgctgggaggctccagcgtgttcctgtttccacccaagccaaaggacaccctgatgatcagcagaacccccgaggtgacatgcgtggtggtggacgtgtctcacgaggaccccgaggtgaagttcaactggtacgtggatggcgtggaggtgcataatgccaagaccaagcctagagaggagcagtacaatagcacctatcgcgtggtgtctgtgctgacagtgctgcaccaggactggctgaacggcaaggagtataagtgcaaggtgtccaataaggctctgcccgcccctatcgagaagaccatcagcaaggctaagggccagcctagggagccacaggtgtacacactgcctccatcccgggacgagctgaccaagaaccaggtgagcctgacatgtctggtgaagggcttctatccaagcgatatcgccgtggagtgggagtctaatggccagcccgagaacaattacaagaccacaccccctgtgctggactccgatggcagcttctttctgtattccaagctgaccgtggataagagccgctggcagcagggcaacgtgttttcctgtagcgtgatgcatgaggctctgcacaatcattacacacagaagtctctgtccctgagccctggcaag

SEQ ID NO: 194 - DNA, 1383 bp, Artificial Sequence
  source: /note="Description of Artificial Sequence: Synthetic polynucleotide"
atgcccctgctgctgctgctgcctctgctgtgggctggcgctctggctcaggtgcagctggtgcagtctggagctgaggtggtgaagcctggagctagcgtgaagctgtcttgcaaggcttccggctacatcttcacctcctactatatgtattgggtgaagcaggctcctggacagggcctggagtggatcggcgagatcaacccatccaatggcgacacaaacttcaatgagaagtttaagagcaaggctaccctgacagtggataagtccgcctctaccgcctacatggagctgtccagcctgaggagcgaggacacagccgtgtactattgtaccaggagcgatggccggaacgacatggattcttggggccagggcacactggtgaccgtgtcttccgctagcacaaagggaccatccgtgttcccactggctccatgctccaggagcacatctgagtccaccgccgctctgggctgtctggtgaaggactatttccctgagccagtgaccgtgtcctggaatagcggcgctctgacatccggagtgcacacctttccagccgtgctgcagagctctggcctgtacagcctgtccagcgtggtgacagtgccttcttccagcctgggcaccaagacatatacctgcaacgtggaccataagccatctaataccaaggtggataagagagtggagtccaagtacggaccaccttgcccaccatgtccagctcctgagttcgctggaggaccatccgtgttcctgtttcctccaaagcccaaggacaccctgatgatctctcgcacaccagaggtgacctgcgtggtggtggacgtgtcccaggaggaccccgaggtgcagttcaactggtacgtggatggcgtggaggtgcacaatgctaagaccaagcccagggaggagcagtttaactccacataccgggtggtgagcgtgctgaccgtgctgcatcaggattggctgaacggcaaggagtataagtgcaaggtgagcaataagggcctgccttcttccatcgagaagacaatctctaaggctaagggccagcctcgggagccacaggtgtacaccctgccccctagccaggaggagatgacaaagaaccaggtgtctctgacctgtctggtgaagggcttctatccctccgacatcgccgtggagtgggagagcaatggccagcctgagaacaattacaagaccacaccacccgtgctggactctgatggctccttctttctgtattctagactgaccgtcgataagtcccgctggcaggagggcaacgtgtttagctgctctgtgatgcacgaggccctgcacaatcattacacccagaagtccctgagcctgtctctgggcaag

SEQ ID NO: 195 - protein, 238 aa, Artificial Sequence
  source: /note="Description of Artificial Sequence: Synthetic polypeptide"
MRLPAQLLGLLMLWVSGSSGDIVLTQSPATLSVSPGERATISCRASQRVSSSTYSYMHWYQQKPGQPPKLLIKYASNLESGVPARFSGSGSGTDFTLTISSVEPEDFATYYCQHSWEIPPTFGGGTKLEIKRTVAAPSVFIFPPSDEQLKSGTASVVCLLNNFYPREAKVQWKVDNALQSGNSQESVTEQDSKDSTYSLSSTLTLSKADYEKHKVYACEVTHQGLSSPVTKSFNRGEC

SEQ ID NO: 196 - protein, 218 aa, Artificial Sequence
  source: /note="Description of Artificial Sequence: Synthetic polypeptide"
DIVLTQSPATLSVSPGERATISCRASQRVSSSTYSYMHWYQQKPGQPPKLLIKYASNLESGVPARFSGSGSGTDFTLTISSVEPEDFATYYCQHSWEIPPTFGGGTKLEIKRTVAAPSVFIFPPSDEQLKSGTASVVCLLNNFYPREAKVQWKVDNALQSGNSQESVTEQDSKDSTYSLSSTLTLSKADYEKHKVYACEVTHQGLSSPVTKSFNRGEC

SEQ ID NO: 197 - DNA, 714 bp, Artificial Sequence
  source: /note="Description of Artificial Sequence: Synthetic polynucleotide"
atgaggctgccagctcagctgctgggactgctgatgctgtgggtgtccggctccagcggcgacatcgtgctgacccagagcccagctacactgtccgtgtcccctggagagagggctaccatcagctgcagggcttctcagcgggtgtcttccagcacatacagctatatgcactggtaccagcagaagccaggccagccccctaagctgctgatcaagtatgcctccaacctggagagcggagtgccagctagattcagcggctctggctccggcaccgactttaccctgacaatctcttccgtggagcctgaggatttcgccacatactattgccagcattcttgggagatcccacccacctttggcggcggcacaaagctggagatcaagagaaccgtggccgctcctagcgtgttcatctttcctccatctgacgagcagctgaagtctggcaccgcttccgtggtgtgcctgctgaacaatttctacccacgcgaggccaaggtgcagtggaaggtggataacgctctgcagagcggcaattctcaggagtccgtgaccgagcaggacagcaaggattctacatattccctgagctctaccctgacactgtctaaggccgattacgagaagcacaaggtgtatgcttgcgaggtgacccatcagggcctgtccagcccagtgacaaagtcctttaatcgcggcgagtgt

SEQ ID NO: 198 - DNA, 652 bp, Artificial Sequence
  source: /note="Description of Artificial Sequence: Synthetic polynucleotide"
catcgtgctgacccagagcccagctacactgtccgtgtcccctggagagagggctaccatcagctgcagggcttctcagcgggtgtcttccagcacatacagctatatgcactggtaccagcagaagccaggccagccccctaagctgctgatcaagtatgcctccaacctggagagcggagtgccagctagattcagcggctctggctccggcaccgactttaccctgacaatctcttccgtggagcctgaggatttcgccacatactattgccagcattcttgggagatcccacccacctttggcggcggcacaaagctggagatcaagagaaccgtggccgctcctagcgtgttcatctttcctccatctgacgagcagctgaagtctggcaccgcttccgtggtgtgcctgctgaacaatttctacccacgcgaggccaaggtgcagtggaaggtggataacgctctgcagagcggcaattctcaggagtccgtgaccgagcaggacagcaaggattctacatattccctgagctctaccctgacactgtctaaggccgattacgagaagcacaaggtgtatgcttgcgaggtgacccatcagggcctgtccagcccagtgacaaagtcctttaatcgcggcgagtgt

SEQ ID NO: 199 - protein, 5 aa, Artificial Sequence
  source: /note="Description of Artificial Sequence: Synthetic peptide"
GGGGS

SEQ ID NO: 200 - protein, 10 aa, Artificial Sequence
  source: /note="Description of Artificial Sequence: Synthetic peptide"
GGGGSGGGGS

SEQ ID NO: 201 - protein, 15 aa, Artificial Sequence
  source: /note="Description of Artificial Sequence: Synthetic peptide"
GGGGSGGGGSGGGGS

SEQ ID NO: 202 - protein, 20 aa, Artificial Sequence
  source: /note="Description of Artificial Sequence: Synthetic peptide"
GGGGSGGGGSGGGGSGGGGS

SEQ ID NO: 203 - protein, 25 aa, Artificial Sequence
  source: /note="Description of Artificial Sequence: Synthetic peptide"
GGGGSGGGGSGGGGSGGGGSGGGGS

SEQ ID NO: 204 - protein, 5 aa, Artificial Sequence
  source: /note="Description of Artificial Sequence: Synthetic peptide"
GSSGG

SEQ ID NO: 205 - protein, 10 aa, Artificial Sequence
  source: /note="Description of Artificial Sequence: Synthetic peptide"
GSSGGGSSGG

SEQ ID NO: 206 - protein, 15 aa, Artificial Sequence
  source: /note="Description of Artificial Sequence: Synthetic peptide"
GSSGGGSSGGGSSGG

SEQ ID NO: 207 - protein, 20 aa, Artificial Sequence
  source: /note="Description of Artificial Sequence: Synthetic peptide"
GSSGGGSSGGGSSGGGSSGG

SEQ ID NO: 208 - protein, 25 aa, Artificial Sequence
  source: /note="Description of Artificial Sequence: Synthetic peptide"
GSSGGGSSGGGSSGGGSSGGGSSGG

SEQ ID NO: 209 - protein, 5 aa, Artificial Sequence
  source: /note="Description of Artificial Sequence: Synthetic peptide"
GGSGG

SEQ ID NO: 210 - protein, 10 aa, Artificial Sequence
  source: /note="Description of Artificial Sequence: Synthetic peptide"
GGSGGGGSGG

SEQ ID NO: 211 - protein, 15 aa, Artificial Sequence
  source: /note="Description of Artificial Sequence: Synthetic peptide"
GGSGGGGSGGGGSGG

SEQ ID NO: 212 - protein, 20 aa, Artificial Sequence
  source: /note="Description of Artificial Sequence: Synthetic peptide"
GGSGGGGSGGGGSGGGGSGG

SEQ ID NO: 213 - protein, 25 aa, Artificial Sequence
  source: /note="Description of Artificial Sequence: Synthetic peptide"
GGSGGGGSGGGGSGGGGSGGGGSGG

SEQ ID NO: 214 - protein, 2 aa, Artificial Sequence
  source: /note="Description of Artificial Sequence: Synthetic peptide"
AS

SEQ ID NO: 215 - protein, 3 aa, Artificial Sequence
  source: /note="Description of Artificial Sequence: Synthetic peptide"
AST

SEQ ID NO: 216 - protein, 6 aa, Artificial Sequence
  source: /note="Description of Artificial Sequence: Synthetic peptide"
TVAAPS

SEQ ID NO: 217 - protein, 3 aa, Artificial Sequence
  source: /note="Description of Artificial Sequence: Synthetic peptide"
TVA

SEQ ID NO: 218 - protein, 7 aa, Artificial Sequence
  source: /note="Description of Artificial Sequence: Synthetic peptide"
ASTSGPS

SEQ ID NO: 219 - protein, 18 aa, Artificial Sequence
  source: /note="Description of Artificial Sequence: Synthetic peptide"
KESGSVSSEQLAQFRSLD

SEQ ID NO: 220 - protein, 14 aa, Artificial Sequence
  source: /note="Description of Artificial Sequence: Synthetic peptide"
EGKSSGSGSESKST

SEQ ID NO: 221 - protein, 6 aa, Artificial Sequence
  source: /note="Description of Artificial Sequence: Synthetic peptide"
GGGGGG

SEQ ID NO: 222 - protein, 8 aa, Artificial Sequence
  source: /note="Description of Artificial Sequence: Synthetic peptide"
GGGGGGGG

SEQ ID NO: 223 - protein, 12 aa, Artificial Sequence
  source: /note="Description of Artificial Sequence: Synthetic peptide"
GSAGSAAGSGEF

SEQ ID NO: 224 - protein, 16 aa, Artificial Sequence
  source: /note="Description of Artificial Sequence: Synthetic peptide"
MPLLLLLPLLWAGALA

SEQ ID NO: 225 - protein, 20 aa, Artificial Sequence
  source: /note="Description of Artificial Sequence: Synthetic peptide"
MRLPAQLLGLLMLWVSGSSG

SEQ ID NO: 226 - DNA, 48 bp, Artificial Sequence
  source: /note="Description of Artificial Sequence: Synthetic oligonucleotide"
atgccactgctgctgctgctgccactgctgtgggctggcgctctggct

SEQ ID NO: 227 - DNA, 62 bp, Artificial Sequence
  source: /note="Description of Artificial Sequence: Synthetic oligonucleotide"
atgaggctgccagctcagctgctgggactgctgatgctgtgggtgtccggctccagcggcga

SEQ ID NO: 228 - DNA, 17 bp, Unknown
  Description of Unknown: EcoRI site sequence
gaattcggccggccacc

SEQ ID NO: 229 - DNA, 18 bp, Unknown
  Description of Unknown: BamHI site sequence
taatgaacgcgtggatcc

SEQ ID NO: 230 - protein, 353 aa, Artificial Sequence
  source: /note="Description of Artificial Sequence: Synthetic polypeptide"
EVQLLESGGGLVQPGGSLRLSCAASGFTFNWELMGWARQAPGKGLEWVSGIEGPGDVTYYADSVKGRFTISRDNSKNTLYLQMNSLRAEDTAVYYCVKVGKDAKSDYRGQGTLVTVSSASTEPKSSDKTHTSPPSPAPELLGGSSVFLFPPKPKDTLMISRTPEVTCVVVDVSHEDPEVKFNWYVDGVEVHNAKTKPREEQYNSTYRVVSVLTVLHQDWLNGKEYKCKVSNKALPAPIEKTISKAKGQPREPQVYTLPPSRDELTKNQVSLTCLVKGFYPSDIAVEWESNGQPENNYKTTPPVLDSDGSFFLYSKLTVDKSRWQQGNVFSCSVMHEALHNHYTQKSLSLSPGK

SEQ ID NO: 231 - protein, 217 aa, Artificial Sequence; identical to SEQ ID NO: 13
  source: /note="Description of Artificial Sequence: Synthetic polypeptide"

SEQ ID NO: 232 - protein, 232 aa, Artificial Sequence; identical to SEQ ID NO: 41
  source: /note="Description of Artificial Sequence: Synthetic polypeptide"

SEQ ID NO: 233 - protein, 118 aa, Artificial Sequence
  source: /note="Description of Artificial Sequence: Synthetic polypeptide"
EVQLLESGGGLVQPGGSLRLSCAASGFTFNWELMGWARQAPGKGLEWVSGIEGPGDVTYYADSVKGRFTISRDNSKNTLYLQMNSLRAEDTAVYYCVKVGKDAKSDYRGQGTLVTVSS

SEQ ID NO: 234 - protein, 445 aa, Artificial Sequence
  source: /note="Description of Artificial Sequence: Synthetic polypeptide"
QVQLVQSGAEVVKPGASVKLSCKASGYIFTSYYMYWVKQAPGQGLEWIGEINPSNGDTNFNEKFKSKATLTVDKSASTAYMELSSLRSEDTAVYYCTRSDGRNDMDSWGQGTLVTVSSASTKGPSVFPLAPCSRSTSESTAALGCLVKDYFPEPVTVSWNSGALTSGVHTFPAVLQSSGLYSLSSVVTVPSSSLGTKTYTCNVDHKPSNTKVDKRVESKYGPPCPPCPAPEFLGGPSVFLFPPKPKDTLMISRTPEVTCVVVDVSQEDPEVQFNWYVDGVEVHNAKTKPREEQFNSTYRVVSVLTVLHQDWLNGKEYKCKVSNKGLPSSIEKTISKAKGQPREPQVYTLPPSQEEMTKNQVSLTCLVKGFYPSDIAVEWESNGQPENNYKTTPPVLDSDGSFFLYSRLTVDKSRWQEGNVFSCSVMHEALHNHYTQKSLSLSLGK

SEQ ID NO: 235 - protein, 229 aa, Artificial Sequence
  source: /note="Description of Artificial Sequence: Synthetic polypeptide"
ESKYGPPCPPCPAPEFLGGPSVFLFPPKPKDTLMISRTPEVTCVVVDVSQEDPEVQFNWYVDGVEVHNAKTKPREEQFNSTYRVVSVLTVLHQDWLNGKEYKCKVSNKGLPSSIEKTISKAKGQPREPQVYTLPPSQEEMTKNQVSLTCLVKGFYPSDIAVEWESNGQPENNYKTTPPVLDSDGSFFLYSRLTVDKSRWQEGNVFSCSVMHEALHNHYTQKSLSLSLGK

SEQ ID NO: 236 - protein, 217 aa, Homo sapiens; identical to SEQ ID NO: 17

SEQ ID NO: 237 - protein, 216 aa, Artificial Sequence; identical to SEQ ID NO: 8
  source: /note="Description of Artificial Sequence: Synthetic polypeptide"

SEQ ID NO: 238 - protein, 216 aa, Artificial Sequence
  source: /note="Description of Artificial Sequence: Synthetic polypeptide"
APEFEGGPSVFLFPPKPKDTLMISRTPEVTCVVVDVSQEDPEVQFNWYVDGVEVHNAKTKPREEQFNSTYRVVSVLTVLHQDWLNGKEYKCKVSNKGLPSSIEKTISKAKGQPREPQVYTLPPSQEEMTKNQVSLTCLVKGFYPSDIAVEWESNGQPENNYKTTPPVLDSDGSFFLYSRLTVDKSRWQEGNVFSCSVMHEALHNHYTQKSLSLSLG

SEQ ID NO: 239 - protein, 216 aa, Artificial Sequence
  source: /note="Description of Artificial Sequence: Synthetic polypeptide"
APEAAGGPSVFLFPPKPKDTLMISRTPEVTCVVVDVSQEDPEVQFNWYVDGVEVHNAKTKPREEQFNSTYRVVSVLTVLHQDWLNGKEYKCKVSNKGLPSSIEKTISKAKGQPREPQVYTLPPSQEEMTKNQVSLTCLVKGFYPSDIAVEWESNGQPENNYKTTPPVLDSDGSFFLYSRLTVDKSRWQEGNVFSCSVMHEALHNHYTQKSLSLSLG

SEQ ID NO: 240 - protein, 217 aa, Artificial Sequence
  source: /note="Description of Artificial Sequence: Synthetic polypeptide"
APEFEGGPSVFLFPPKPKDTLMISRTPEVTCVVVDVSQEDPEVQFNWYVDGVEVHNAKTKPREEQFNSTYRVVSVLTVLHQDWLNGKEYKCKVSNKGLPSSIEKTISKAKGQPREPQVYTLPPSQEEMTKNQVSLTCLVKGFYPSDIAVEWESNGQPENNYKTTPPVLDSDGSFFLYSRLTVDKSRWQEGNVFSCSVMHEALHNHYTQKSLSLSLGK

SEQ ID NO: 241 - protein, 217 aa, Artificial Sequence
  source: /note="Description of Artificial Sequence: Synthetic polypeptide"
APEAAGGPSVFLFPPKPKDTLMISRTPEVTCVVVDVSQEDPEVQFNWYVDGVEVHNAKTKPREEQFNSTYRVVSVLTVLHQDWLNGKEYKCKVSNKGLPSSIEKTISKAKGQPREPQVYTLPPSQEEMTKNQVSLTCLVKGFYPSDIAVEWESNGQPENNYKTTPPVLDSDGSFFLYSRLTVDKSRWQEGNVFSCSVMHEALHNHYTQKSLSLSLGK

SEQ ID NO: 242 - protein, 228 aa, Artificial Sequence
  source: /note="Description of Artificial Sequence: Synthetic polypeptide"
ESKYGPPCPPCPAPEFLGGPSVFLFPPKPKDTLMISRTPEVTCVVVDVSQEDPEVQFNWYVDGVEVHNAKTKPREEQFNSTYRVVSVLTVLHQDWLNGKEYKCKVSNKGLPSSIEKTISKAKGQPREPQVYTLPPSQEEMTKNQVSLTCLVKGFYPSDIAVEWESNGQPENNYKTTPPVLDSDGSFFLYSRLTVDKSRWQEGNVFSCSVMHEALHNHYTQKSLSLSLG

SEQ ID NO: 243 - protein, 228 aa, Artificial Sequence
  source: /note="Description of Artificial Sequence: Synthetic polypeptide"
ESKYGPPCPPCPAPEFEGGPSVFLFPPKPKDTLMISRTPEVTCVVVDVSQEDPEVQFNWYVDGVEVHNAKTKPREEQFNSTYRVVSVLTVLHQDWLNGKEYKCKVSNKGLPSSIEKTISKAKGQPREPQVYTLPPSQEEMTKNQVSLTCLVKGFYPSDIAVEWESNGQPENNYKTTPPVLDSDGSFFLYSRLTVDKSRWQEGNVFSCSVMHEALHNHYTQKSLSLSLG

SEQ ID NO: 244 - protein, 228 aa, Artificial Sequence
  source: /note="Description of Artificial Sequence: Synthetic polypeptide"
ESKYGPPCPPCPAPEAAGGPSVFLFPPKPKDTLMISRTPEVTCVVVDVSQEDPEVQFNWYVDGVEVHNAKTKPREEQFNSTYRVVSVLTVLHQDWLNGKEYKCKVSNKGLPSSIEKTISKAKGQPREPQVYTLPPSQEEMTKNQVSLTCLVKGFYPSDIAVEWESNGQPENNYKTTPPVLDSDGSFFLYSRLTVDKSRWQEGNVFSCSVMHEALHNHYTQKSLSLSLG

SEQ ID NO: 245 - protein, 231 aa, Artificial Sequence
  source: /note="Description of Artificial Sequence: Synthetic polypeptide"
EPKSCDKTHTCPPSPAPELLGGSSVFLFPPKPKDTLMISRTPEVTCVVVDVSHEDPEVKFNWYVDGVEVHNAKTKPREEQYNSTYRVVSVLTVLHQDWLNGKEYKCKVSNKALPAPIEKTISKAKGQPREPQVYTLPPSRDELTKNQVSLTCLVKGFYPSDIAVEWESNGQPENNYKTTPPVLDSDGSFFLYSKLTVDKSRWQQGNVFSCSVMHEALHNHYTQKSLSLSPG

SEQ ID NO: 246 - protein, 231 aa, Artificial Sequence
  source: /note="Description of Artificial Sequence: Synthetic polypeptide"
EPKSCDKTHTSPPCPAPELLGGSSVFLFPPKPKDTLMISRTPEVTCVVVDVSHEDPEVKFNWYVDGVEVHNAKTKPREEQYNSTYRVVSVLTVLHQDWLNGKEYKCKVSNKALPAPIEKTISKAKGQPREPQVYTLPPSRDELTKNQVSLTCLVKGFYPSDIAVEWESNGQPENNYKTTPPVLDSDGSFFLYSKLTVDKSRWQQGNVFSCSVMHEALHNHYTQKSLSLSPG

SEQ ID NO: 247 - protein, 229 aa, Artificial Sequence
  source: /note="Description of Artificial Sequence: Synthetic polypeptide"
ESKYGPPCPPCPAPEFEGGPSVFLFPPKPKDTLMISRTPEVTCVVVDVSQEDPEVQFNWYVDGVEVHNAKTKPREEQFNSTYRVVSVLTVLHQDWLNGKEYKCKVSNKGLPSSIEKTISKAKGQPREPQVYTLPPSQEEMTKNQVSLTCLVKGFYPSDIAVEWESNGQPENNYKTTPPVLDSDGSFFLYSRLTVDKSRWQEGNVFSCSVMHEALHNHYTQKSLSLSLGK

SEQ ID NO: 248 - protein, 229 aa, Artificial Sequence
  source: /note="Description of Artificial Sequence: Synthetic polypeptide"
ESKYGPPCPPCPAPEAAGGPSVFLFPPKPKDTLMISRTPEVTCVVVDVSQEDPEVQFNWYVDGVEVHNAKTKPREEQFNSTYRVVSVLTVLHQDWLNGKEYKCKVSNKGLPSSIEKTISKAKGQPREPQVYTLPPSQEEMTKNQVSLTCLVKGFYPSDIAVEWESNGQPENNYKTTPPVLDSDGSFFLYSRLTVDKSRWQEGNVFSCSVMHEALHNHYTQKSLSLSLGK

SEQ ID NO: 249 - protein, 232 aa, Artificial Sequence
  source: /note="Description of Artificial Sequence: Synthetic polypeptide"
EPKSCDKTHTCPPSPAPELLGGSSVFLFPPKPKDTLMISRTPEVTCVVVDVSHEDPEVKFNWYVDGVEVHNAKTKPREEQYNSTYRVVSVLTVLHQDWLNGKEYKCKVSNKALPAPIEKTISKAKGQPREPQVYTLPPSRDELTKNQVSLTCLVKGFYPSDIAVEWESNGQPENNYKTTPPVLDSDGSFFLYSKLTVDKSRWQQGNVFSCSVMHEALHNHYTQKSLSLSPGK

SEQ ID NO: 250 - protein, 232 aa, Artificial Sequence
  source: /note="Description of Artificial Sequence: Synthetic polypeptide"
EPKSCDKTHTSPPCPAPELLGGSSVFLFPPKPKDTLMISRTPEVTCVVVDVSHEDPEVKFNWYVDGVEVHNAKTKPREEQYNSTYRVVSVLTVLHQDWLNGKEYKCKVSNKALPAPIEKTISKAKGQPREPQVYTLPPSRDELTKNQVSLTCLVKGFYPSDIAVEWESNGQPENNYKTTPPVLDSDGSFFLYSKLTVDKSRWQQGNVFSCSVMHEALHNHYTQKSLSLSPGK

SEQ ID NO: 251 - protein, 229 aa, Artificial Sequence; identical to SEQ ID NO: 42
  source: /note="Description of Artificial Sequence: Synthetic polypeptide"

SEQ ID NO: 252 - protein, 134 aa, Artificial Sequence
  source: /note="Description of Artificial Sequence: Synthetic polypeptide"
MPLLLLLPLLWAGALAQVQLVQSGAEVVKPGASVKLSCKASGYIFTSYYMYWVKQAPGQGLEWIGEINPSNGDTNFNEKFKSKATLTVDKSASTAYMELSSLRSEDTAVYYCTRSDGRNDMDSWGQGTTVTVSS

SEQ ID NO: 253 - protein, 118 aa, Artificial Sequence
  source: /note="Description of Artificial Sequence: Synthetic polypeptide"
QVQLVQSGAEVVKPGASVKLSCKASGYIFTSYYMYWVKQAPGQGLEWIGEINPSNGDTNFNEKFKSKATLTVDKSASTAYMELSSLRSEDTAVYYCTRSDGRNDMDSWGQGTTVTVSS

SEQ ID NO: 254 - protein, 326 aa, Artificial Sequence
  source: /note="Description of Artificial Sequence: Synthetic polypeptide"
ASTKGPSVFPLAPCSRSTSESTAALGCLVKDYFPEPVTVSWNSGALTSGVHTFPAVLQSSGLYSLSSVVTVPSSSLGTKTYTCNVDHKPSNTKVDKRVESKYGPPCPPCPAPEFLGGPSVFLFPPKPKDTLMISRTPEVTCVVVDVSQEDPEVQFNWYVDGVEVHNAKTKPREEQFNSTYRVVSVLTVLHQDWLNGKEYKCKVSNKGLPSSIEKTISKAKGQPREPQVYTLPPSQEEMTKNQVSLTCLVKGFYPSDIAVEWESNGQPENNYKTTPPVLDSDGSFFLYSRLTVDKSRWQEGNVFSCSVMHEALHNHYTQKSLSLSLG

SEQ ID NO: 255 - protein, 326 aa, Artificial Sequence
  source: /note="Description of Artificial Sequence: Synthetic polypeptide"
ASTKGPSVFPLAPCSRSTSESTAALGCLVKDYFPEPVTVSWNSGALTSGVHTFPAVLQSSGLYSLSSVVTVPSSSLGTKTYTCNVDHKPSNTKVDKRVESKYGPPCPPCPAPEFEGGPSVFLFPPKPKDTLMISRTPEVTCVVVDVSQEDPEVQFNWYVDGVEVHNAKTKPREEQFNSTYRVVSVLTVLHQDWLNGKEYKCKVSNKGLPSSIEKTISKAKGQPREPQVYTLPPSQEEMTKNQVSLTCLVKGFYPSDIAVEWESNGQPENNYKTTPPVLDSDGSFFLYSRLTVDKSRWQEGNVFSCSVMHEALHNHYTQKSLSLSLG

SEQ ID NO: 256 - protein, 326 aa, Artificial Sequence
  source: /note="Description of Artificial Sequence: Synthetic polypeptide"
ASTKGPSVFPLAPCSRSTSESTAALGCLVKDYFPEPVTVSWNSGALTSGVHTFPAVLQSSGLYSLSSVVTVPSSSLGTKTYTCNVDHKPSNTKVDKRVESKYGPPCPPCPAPEAAGGPSVFLFPPKPKDTLMISRTPEVTCVVVDVSQEDPEVQFNWYVDGVEVHNAKTKPREEQFNSTYRVVSVLTVLHQDWLNGKEYKCKVSNKGLPSSIEKTISKAKGQPREPQVYTLPPSQEEMTKNQVSLTCLVKGFYPSDIAVEWESNGQPENNYKTTPPVLDSDGSFFLYSRLTVDKSRWQEGNVFSCSVMHEALHNHYTQKSLSLSLG

SEQ ID NO: 257 - protein, 329 aa, Artificial Sequence
  source: /note="Description of Artificial Sequence: Synthetic polypeptide"
ASTKGPSVFPLAPSSKSTSGGTAALGCLVKDYFPEPVTVSWNSGALTSGVHTFPAVLQSSGLYSLSSVVTVPSSSLGTQTYICNVNHKPSNTKVDKKVEPKSCDKTHTCPPSPAPELLGGSSVFLFPPKPKDTLMISRTPEVTCVVVDVSHEDPEVKFNWYVDGVEVHNAKTKPREEQYNSTYRVVSVLTVLHQDWLNGKEYKCKVSNKALPAPIEKTISKAKGQPREPQVYTLPPSRDELTKNQVSLTCLVKGFYPSDIAVEWESNGQPENNYKTTPPVLDSDGSFFLYSKLTVDKSRWQQGNVFSCSVMHEALHNHYTQKSLSLSPG

SEQ ID NO: 258 - protein, 329 aa, Artificial Sequence
  source: /note="Description of Artificial Sequence: Synthetic polypeptide"
ASTKGPSVFPLAPSSKSTSGGTAALGCLVKDYFPEPVTVSWNSGALTSGVHTFPAVLQSSGLYSLSSVVTVPSSSLGTQTYICNVNHKPSNTKVDKKVEPKSCDKTHTSPPCPAPELLGGSSVFLFPPKPKDTLMISRTPEVTCVVVDVSHEDPEVKFNWYVDGVEVHNAKTKPREEQYNSTYRVVSVLTVLHQDWLNGKEYKCKVSNKALPAPIEKTISKAKGQPREPQVYTLPPSRDELTKNQVSLTCLVKGFYPSDIAVEWESNGQPENNYKTTPPVLDSDGSFFLYSKLTVDKSRWQQGNVFSCSVMHEALHNHYTQKSLSLSPG

SEQ ID NO: 259 - protein, 326 aa, Artificial Sequence; identical to SEQ ID NO: 95
  source: /note="Description of Artificial Sequence: Synthetic polypeptide"

SEQ ID NO: 260 - protein, 327 aa, Artificial Sequence
  source: /note="Description of Artificial Sequence: Synthetic polypeptide"
ASTKGPSVFPLAPCSRSTSESTAALGCLVKDYFPEPVTVSWNSGALTSGVHTFPAVLQSSGLYSLSSVVTVPSSSLGTKTYTCNVDHKPSNTKVDKRVESKYGPPCPPCPAPEFLGGPSVFLFPPKPKDTLMISRTPEVTCVVVDVSQEDPEVQFNWYVDGVEVHNAKTKPREEQFNSTYRVVSVLTVLHQDWLNGKEYKCKVSNKGLPSSIEKTISKAKGQPREPQVYTLPPSQEEMTKNQVSLTCLVKGFYPSDIAVEWESNGQPENNYKTTPPVLDSDGSFFLYSRLTVDKSRWQEGNVFSCSVMHEALHNHYTQKSLSLSLGK

SEQ ID NO: 261 - protein, 327 aa, Artificial Sequence
  source: /note="Description of Artificial Sequence: Synthetic polypeptide"
ASTKGPSVFPLAPCSRSTSESTAALGCLVKDYFPEPVTVSWNSGALTSGVHTFPAVLQSSGLYSLSSVVTVPSSSLGTKTYTCNVDHKPSNTKVDKRVESKYGPPCPPCPAPEFEGGPSVFLFPPKPKDTLMISRTPEVTCVVVDVSQEDPEVQFNWYVDGVEVHNAKTKPREEQFNSTYRVVSVLTVLHQDWLNGKEYKCKVSNKGLPSSIEKTISKAKGQPREPQVYTLPPSQEEMTKNQVSLTCLVKGFYPSDIAVEWESNGQPENNYKTTPPVLDSDGSFFLYSRLTVDKSRWQEGNVFSCSVMHEALHNHYTQKSLSLSLGK

SEQ ID NO: 262 - protein, 327 aa, Artificial Sequence
  source: /note="Description of Artificial Sequence: Synthetic polypeptide"
ASTKGPSVFPLAPCSRSTSESTAALGCLVKDYFPEPVTVSWNSGALTSGVHTFPAVLQSSGLYSLSSVVTVPSSSLGTKTYTCNVDHKPSNTKVDKRVESKYGPPCPPCPAPEAAGGPSVFLFPPKPKDTLMISRTPEVTCVVVDVSQEDPEVQFNWYVDGVEVHNAKTKPREEQFNSTYRVVSVLTVLHQDWLNGKEYKCKVSNKGLPSSIEKTISKAKGQPREPQVYTLPPSQEEMTKNQVSLTCLVKGFYPSDIAVEWESNGQPENNYKTTPPVLDSDGSFFLYSRLTVDKSRWQEGNVFSCSVMHEALHNHYTQKSLSLSLGK

SEQ ID NO: 263 - protein, 330 aa, Artificial Sequence
  source: /note="Description of Artificial Sequence: Synthetic polypeptide"
ASTKGPSVFPLAPSSKSTSGGTAALGCLVKDYFPEPVTVSWNSGALTSGVHTFPAVLQSSGLYSLSSVVTVPSSSLGTQTYICNVNHKPSNTKVDKKVEPKSCDKTHTCPPSPAPELLGGSSVFLFPPKPKDTLMISRTPEVTCVVVDVSHEDPEVKFNWYVDGVEVHNAKTKPREEQYNSTYRVVSVLTVLHQDWLNGKEYKCKVSNKALPAPIEKTISKAKGQPREPQVYTLPPSRDELTKNQVSLTCLVKGFYPSDIAVEWESNGQPENNYKTTPPVLDSDGSFFLYSKLTVDKSRWQQGNVFSCSVMHEALHNHYTQKSLSLSPGK

SEQ ID NO: 264 - protein, 330 aa, Artificial Sequence
  source: /note="Description of Artificial Sequence: Synthetic polypeptide"
ASTKGPSVFPLAPSSKSTSGGTAALGCLVKDYFPEPVTVSWNSGALTSGVHTFPAVLQSSGLYSLSSVVTVPSSSLGTQTYICNVNHKPSNTKVDKKVEPKSCDKTHTSPPCPAPELLGGSSVFLFPPKPKDTLMISRTPEVTCVVVDVSHEDPEVKFNWYVDGVEVHNAKTKPREEQYNSTYRVVSVLTVLHQDWLNGKEYKCKVSNKALPAPIEKTISKAKGQPREPQVYTLPPSRDELTKNQVSLTCLVKGFYPSDIAVEWESNGQPENNYKTTPPVLDSDGSFFLYSKLTVDKSRWQQGNVFSCSVMHEALHNHYTQKSLSLSPGK

SEQ ID NO: 265 - protein, 327 aa, Artificial Sequence; identical to SEQ ID NO: 109
  source: /note="Description of Artificial Sequence: Synthetic polypeptide"

SEQ ID NO: 266 - protein, 460 aa, Artificial Sequence
  source: /note="Description of Artificial Sequence: Synthetic polypeptide"
MPLLLLLPLLWAGALAQVQLVQSGAEVVKPGASVKLSCKASGYIFTSYYMYWVKQAPGQGLEWIGEINPSNGDTNFNEKFKSKATLTVDKSASTAYMELSSLRSEDTAVYYCTRSDGRNDMDSWGQGTLVTVSSASTKGPSVFPLAPCSRSTSESTAALGCLVKDYFPEPVTVSWNSGALTSGVHTFPAVLQSSGLYSLSSVVTVPSSSLGTKTYTCNVDHKPSNTKVDKRVESKYGPPCPPCPAPEFLGGPSVFLFPPKPKDTLMISRTPEVTCVVVDVSQEDPEVQFNWYVDGVEVHNAKTKPREEQFNSTYRVVSVLTVLHQDWLNGKEYKCKVSNKGLPSSIEKTISKAKGQPREPQVYTLPPSQEEMTKNQVSLTCLVKGFYPSDIAVEWESNGQPENNYKTTPPVLDSDGSFFLYSRLTVDKSRWQEGNVFSCSVMHEALHNHYTQKSLSLSLG

SEQ ID NO: 267 - protein, 460 aa, Artificial Sequence
  source: /note="Description of Artificial Sequence: Synthetic polypeptide"
MPLLLLLPLLWAGALAQVQLVQSGAEVVKPGASVKLSCKASGYIFTSYYMYWVKQAPGQGLEWIGEINPSNGDTNFNEKFKSKATLTVDKSASTAYMELSSLRSEDTAVYYCTRSDGRNDMDSWGQGTLVTVSSASTKGPSVFPLAPCSRSTSESTAALGCLVKDYFPEPVTVSWNSGALTSGVHTFPAVLQSSGLYSLSSVVTVPSSSLGTKTYTCNVDHKPSNTKVDKRVESKYGPPCPPCPAPEFEGGPSVFLFPPKPKDTLMISRTPEVTCVVVDVSQEDPEVQFNWYVDGVEVHNAKTKPREEQFNSTYRVVSVLTVLHQDWLNGKEYKCKVSNKGLPSSIEKTISKAKGQPREPQVYTLPPSQEEMTKNQVSLTCLVKGFYPSDIAVEWESNGQPENNYKTTPPVLDSDGSFFLYSRLTVDKSRWQEGNVFSCSVMHEALHNHYTQKSLSLSLG

SEQ ID NO: 268 - protein, 460 aa, Artificial Sequence
  source: /note="Description of Artificial Sequence: Synthetic polypeptide"
MPLLLLLPLLWAGALAQVQLVQSGAEVVKPGASVKLSCKASGYIFTSYYMYWVKQAPGQGLEWIGEINPSNGDTNFNEKFKSKATLTVDKSASTAYMELSSLRSEDTAVYYCTRSDGRNDMDSWGQGTLVTVSSASTKGPSVFPLAPCSRSTSESTAALGCLVKDYFPEPVTVSWNSGALTSGVHTFPAVLQSSGLYSLSSVVTVPSSSLGTKTYTCNVDHKPSNTKVDKRVESKYGPPCPPCPAPEAAGGPSVFLFPPKPKDTLMISRTPEVTCVVVDVSQEDPEVQFNWYVDGVEVHNAKTKPREEQFNSTYRVVSVLTVLHQDWLNGKEYKCKVSNKGLPSSIEKTISKAKGQPREPQVYTLPPSQEEMTKNQVSLTCLVKGFYPSDIAVEWESNGQPENNYKTTPPVLDSDGSFFLYSRLTVDKSRWQEGNVFSCSVMHEALHNHYTQKSLSLSLG

SEQ ID NO: 269 - protein, 463 aa, Artificial Sequence
  source: /note="Description of Artificial Sequence: Synthetic polypeptide"
MPLLLLLPLLWAGALAQVQLVQSGAEVVKPGASVKLSCKASGYIFTSYYMYWVKQAPGQGLEWIGEINPSNGDTNFNEKFKSKATLTVDKSASTAYMELSSLRSEDTAVYYCTRSDGRNDMDSWGQGTLVTVSSASTKGPSVFPLAPSSKSTSGGTAALGCLVKDYFPEPVTVSWNSGALTSGVHTFPAVLQSSGLYSLSSVVTVPSSSLGTQTYICNVNHKPSNTKVDKKVEPKSCDKTHTCPPSPAPELLGGSSVFLFPPKPKDTLMISRTPEVTCVVVDVSHEDPEVKFNWYVDGVEVHNAKTKPREEQYNSTYRVVSVLTVLHQDWLNGKEYKCKVSNKALPAPIEKTISKAKGQPREPQVYTLPPSRDELTKNQVSLTCLVKGFYPSDIAVEWESNGQPENNYKTTPPVLDSDGSFFLYSKLTVDKSRWQQGNVFSCSVMHEALHNHYTQKSLSLSPG

SEQ ID NO: 270 - protein, 463 aa, Artificial Sequence
  source: /note="Description of Artificial Sequence: Synthetic polypeptide"
MPLLLLLPLLWAGALAQVQLVQSGAEVVKPGASVKLSCKASGYIFTSYYMYWVKQAPGQGLEWIGEINPSNGDTNFNEKFKSKATLTVDKSASTAYMELSSLRSEDTAVYYCTRSDGRNDMDSWGQGTLVTVSSASTKGPSVFPLAPSSKSTSGGTAALGCLVKDYFPEPVTVSWNSGALTSGVHTFPAVLQSSGLYSLSSVVTVPSSSLGTQTYICNVNHKPSNTKVDKKVEPKSCDKTHTSPPCPAPELLGGSSVFLFPPKPKDTLMISRTPEVTCVVVDVSHEDPEVKFNWYVDGVEVHNAKTKPREEQYNSTYRVVSVLTVLHQDWLNGKEYKCKVSNKALPAPIEKTISKAKGQPREPQVYTLPPSRDELTKNQVSLTCLVKGFYPSDIAVEWESNGQPENNYKTTPPVLDSDGSFFLYSKLTVDKSRWQQGNVFSCSVMHEALHNHYTQKSLSLSPG

SEQ ID NO: 271 - protein, 460 aa, Artificial Sequence
  source: /note="Description of Artificial Sequence: Synthetic polypeptide"
MPLLLLLPLLWAGALAQVQLVQSGAEVVKPGASVKLSCKASGYIFTSYYMYWVKQAPGQGLEWIGEINPSNGDTNFNEKFKSKATLTVDKSASTAYMELSSLRSEDTAVYYCTRSDGRNDMDSWGQGTTVTVSSASTKGPSVFPLAPCSRSTSESTAALGCLVKDYFPEPVTVSWNSGALTSGVHTFPAVLQSSGLYSLSSVVTVPSSSLGTKTYTCNVDHKPSNTKVDKRVESKYGPPCPPCPAPEFAGGPSVFLFPPKPKDTLMISRTPEVTCVVVDVSQEDPEVQFNWYVDGVEVHNAKTKPREEQFNSTYRVVSVLTVLHQDWLNGKEYKCKVSNKGLPSSIEKTISKAKGQPREPQVYTLPPSQEEMTKNQVSLTCLVKGFYPSDIAVEWESNGQPENNYKTTPPVLDSDGSFFLYSRLTVDKSRWQEGNVFSCSVMHEALHNHYTQKSLSLSLG

SEQ ID NO: 272 - protein, 461 aa, Artificial Sequence
  source: /note="Description of Artificial Sequence: Synthetic polypeptide"
MPLLLLLPLLWAGALAQVQLVQSGAEVVKPGASVKLSCKASGYIFTSYYMYWVKQAPGQGLEWIGEINPSNGDTNFNEKFKSKATLTVDKSASTAYMELSSLRSEDTAVYYCTRSDGRNDMDSWGQGTLVTVSSASTKGPSVFPLAPCSRSTSESTAALGCLVKDYFPEPVTVSWNSGALTSGVHTFPAVLQSSGLYSLSSVVTVPSSSLGTKTYTCNVDHKPSNTKVDKRVESKYGPPCPPCPAPEFLGGPSVFLFPPKPKDTLMISRTPEVTCVVVDVSQEDPEVQFNWYVDGVEVHNAKTKPREEQFNSTYRVVSVLTVLHQDWLNGKEYKCKVSNKGLPSSIEKTISKAKGQPREPQVYTLPPSQEEMTKNQVSLTCLVKGFYPSDIAVEWESNGQPENNYKTTPPVLDSDGSFFLYSRLTVDKSRWQEGNVFSCSVMHEALHNHYTQKSLSLSLGK

SEQ ID NO: 273 - protein, 461 aa, Artificial Sequence
  source: /note="Description of Artificial Sequence: Synthetic polypeptide"
MPLLLLLPLLWAGALAQVQLVQSGAEVVKPGASVKLSCKASGYIFTSYYMYWVKQAPGQGLEWIGEINPSNGDTNFNEKFKSKATLTVDKSASTAYMELSSLRSEDTAVYYCTRSDGRNDMDSWGQGTLVTVSSASTKGPSVFPLAPCSRSTSESTAALGCLVKDYFPEPVTVSWNSGALTSGVHTFPAVLQSSGLYSLSSVVTVPSSSLGTKTYTCNVDHKPSNTKVDKRVESKYGPPCPPCPAPEFEGGPSVFLFPPKPKDTLMISRTPEVTCVVVDVSQEDPEVQFNWYVDGVEVHNAKTKPREEQFNSTYRVVSVLTVLHQDWLNGKEYKCKVSNKGLPSSIEKTISKAKGQPREPQVYTLPPSQEEMTKNQVSLTCLVKGFYPSDIAVEWESNGQPENNYKTTPPVLDSDGSFFLYSRLTVDKSRWQEGNVFSCSVMHEALHNHYTQKSLSLSLGK

SEQ ID NO: 274 - protein, 461 aa, Artificial Sequence
  source: /note="Description of Artificial Sequence: Synthetic polypeptide"
MPLLLLLPLLWAGALAQVQLVQSGAEVVKPGASVKLSCKASGYIFTSYYMYWVKQAPGQGLEWIGEINPSNGDTNFNEKFKSKATLTVDKSASTAYMELSSLRSEDTAVYYCTRSDGRNDMDSWGQGTLVTVSSASTKGPSVFPLAPCSRSTSESTAALGCLVKDYFPEPVTVSWNSGALTSGVHTFPAVLQSSGLYSLSSVVTVPSSSLGTKTYTCNVDHKPSNTKVDKRVESKYGPPCPPCPAPEAAGGPSVFLFPPKPKDTLMISRTPEVTCVVVDVSQEDPEVQFNWYVDGVEVHNAKTKPREEQFNSTYRVVSVLTVLHQDWLNGKEYKCKVSNKGLPSSIEKTISKAKGQPREPQVYTLPPSQEEMTKNQVSLTCLVKGFYPSDIAVEWESNGQPENNYKTTPPVLDSDGSFFLYSRLTVDKSRWQEGNVFSCSVMHEALHNHYTQKSLSLSLGK

SEQ ID NO: 275 - protein, 464 aa, Artificial Sequence
  source: /note="Description of Artificial Sequence: Synthetic polypeptide"
MPLLLLLPLLWAGALAQVQLVQSGAEVVKPGASVKLSCKASGYIFTSYYMYWVKQAPGQGLEWIGEINPSNGDTNFNEKFKSKATLTVDKSASTAYMELSSLRSEDTAVYYCTRSDGRNDMDSWGQGTLVTVSSASTKGPSVFPLAPSSKSTSGGTAALGCLVKDYFPEPVTVSWNSGALTSGVHTFPAVLQSSGLYSLSSVVTVPSSSLGTQTYICNVNHKPSNTKVDKKVEPKSCDKTHTCPPSPAPELLGGSSVFLFPPKPKDTLMISRTPEVTCVVVDVSHEDPEVKFNWYVDGVEVHNAKTKPREEQYNSTYRVVSVLTVLHQDWLNGKEYKCKVSNKALPAPIEKTISKAKGQPREPQVYTLPPSRDELTKNQVSLTCLVKGFYPSDIAVEWESNGQPENNYKTTPPVLDSDGSFFLYSKLTVDKSRWQQGNVFSCSVMHEALHNHYTQKSLSLSPGK

SEQ ID NO: 276 - protein, 464 aa, Artificial Sequence
  source: /note="Description of Artificial Sequence: Synthetic polypeptide"
MPLLLLLPLLWAGALAQVQLVQSGAEVVKPGASVKLSCKASGYIFTSYYMYWVKQAPGQGLEWIGEINPSNGDTNFNEKFKSKATLTVDKSASTAYMELSSLRSEDTAVYYCTRSDGRNDMDSWGQGTLVTVSSASTKGPSVFPLAPSSKSTSGGTAALGCLVKDYFPEPVTVSWNSGALTSGVHTFPAVLQSSGLYSLSSVVTVPSSSLGTQTYICNVNHKPSNTKVDKKVEPKSCDKTHTSPPCPAPELLGGSSVFLFPPKPKDTLMISRTPEVTCVVVDVSHEDPEVKFNWYVDGVEVHNAKTKPREEQYNSTYRVVSVLTVLHQDWLNGKEYKCKVSNKALPAPIEKTISKAKGQPREPQVYTLPPSRDELTKNQVSLTCLVKGFYPSDIAVEWESNGQPENNYKTTPPVLDSDGSFFLYSKLTVDKSRWQQGNVFSCSVMHEALHNHYTQKSLSLSPGK

SEQ ID NO: 277 - protein, 461 aa, Artificial Sequence
  source: /note="Description of Artificial Sequence: Synthetic polypeptide"
MPLLLLLPLLWAGALAQVQLVQSGAEVVKPGASVKLSCKASGYIFTSYYMYWVKQAPGQGLEWIGEINPSNGDTNFNEKFKSKATLTVDKSASTAYMELSSLRSEDTAVYYCTRSDGRNDMDSWGQGTTVTVSSASTKGPSVFPLAPCSRSTSESTAALGCLVKDYFPEPVTVSWNSGALTSGVHTFPAVLQSSGLYSLSSVVTVPSSSLGTKTYTCNVDHKPSNTKVDKRVESKYGPPCPPCPAPEFAGGPSVFLFPPKPKDTLMISRTPEVTCVVVDVSQEDPEVQFNWYVDGVEVHNAKTKPREEQFNSTYRVVSVLTVLHQDWLNGKEYKCKVSNKGLPSSIEKTISKAKGQPREPQVYTLPPSQEEMTKNQVSLTCLVKGFYPSDIAVEWESNGQPENNYKTTPPVLDSDGSFFLYSRLTVDKSRWQEGNVFSCSVMHEALHNHYTQKSLSLSLGK

SEQ ID NO: 278 - protein, 444 aa, Artificial Sequence
  source: /note="Description of Artificial Sequence: Synthetic polypeptide"
QVQLVQSGAEVVKPGASVKLSCKASGYIFTSYYMYWVKQAPGQGLEWIGEINPSNGDTNFNEKFKSKATLTVDKSASTAYMELSSLRSEDTAVYYCTRSDGRNDMDSWGQGTLVTVSSASTKGPSVFPLAPCSRSTSESTAALGCLVKDYFPEPVTVSWNSGALTSGVHTFPAVLQSSGLYSLSSVVTVPSSSLGTKTYTCNVDHKPSNTKVDKRVESKYGPPCPPCPAPEFLGGPSVFLFPPKPKDTLMISRTPEVTCVVVDVSQEDPEVQFNWYVDGVEVHNAKTKPREEQFNSTYRVVSVLTVLHQDWLNGKEYKCKVSNKGLPSSIEKTISKAKGQPREPQVYTLPPSQEEMTKNQVSLTCLVKGFYPSDIAVEWESNGQPENNYKTTPPVLDSDGSFFLYSRLTVDKSRWQEGNVFSCSVMHEALHNHYTQKSLSLSLG

SEQ ID NO: 279 - protein, 444 aa, Artificial Sequence
  source: /note="Description of Artificial Sequence: Synthetic polypeptide"
QVQLVQSGAEVVKPGASVKLSCKASGYIFTSYYMYWVKQAPGQGLEWIGEINPSNGDTNFNEKFKSKATLTVDKSASTAYMELSSLRSEDTAVYYCTRSDGRNDMDSWGQGTLVTVSSASTKGPSVFPLAPCSRSTSESTAALGCLVKDYFPEPVTVSWNSGALTSGVHTFPAVLQSSGLYSLSSVVTVPSSSLGTKTYTCNVDHKPSNTKVDKRVESKYGPPCPPCPAPEFEGGPSVFLFPPKPKDTLMISRTPEVTCVVVDVSQEDPEVQFNWYVDGVEVHNAKTKPREEQFNSTYRVVSVLTVLHQDWLNGKEYKCKVSNKGLPSSIEKTISKAKGQPREPQVYTLPPSQEEMTKNQVSLTCLVKGFYPSDIAVEWESNGQPENNYKTTPPVLDSDGSFFLYSRLTVDKSRWQEGNVFSCSVMHEALHNHYTQKSLSLSLG

SEQ ID NO: 280 - protein, 444 aa, Artificial Sequence
  source: /note="Description of Artificial Sequence: Synthetic polypeptide"
QVQLVQSGAEVVKPGASVKLSCKASGYIFTSYYMYWVKQAPGQGLEWIGEINPSNGDTNFNEKFKSKATLTVDKSASTAYMELSSLRSEDTAVYYCTRSDGRNDMDSWGQGTLVTVSSASTKGPSVFPLAPCSRSTSESTAALGCLVKDYFPEPVTVSWNSGALTSGVHTFPAVLQSSGLYSLSSVVTVPSSSLGTKTYTCNVDHKPSNTKVDKRVESKYGPPCPPCPAPEAAGGPSVFLFPPKPKDTLMISRTPEVTCVVVDVSQEDPEVQFNWYVDGVEVHNAKTKPREEQFNSTYRVVSVLTVLHQDWLNGKEYKCKVSNKGLPSSIEKTISKAKGQPREPQVYTLPPSQEEMTKNQVSLTCLVKGFYPSDIAVEWESNGQPENNYKTTPPVLDSDGSFFLYSRLTVDKSRWQEGNVFSCSVMHEALHNHYTQKSLSLSLG

SEQ ID NO: 281 - protein, 447 aa, Artificial Sequence
  source: /note="Description of Artificial Sequence: Synthetic polypeptide"
QVQLVQSGAEVVKPGASVKLSCKASGYIFTSYYMYWVKQAPGQGLEWIGEINPSNGDTNFNEKFKSKATLTVDKSASTAYMELSSLRSEDTAVYYCTRSDGRNDMDSWGQGTLVTVSSASTKGPSVFPLAPSSKSTSGGTAALGCLVKDYFPEPVTVSWNSGALTSGVHTFPAVLQSSGLYSLSSVVTVPSSSLGTQTYICNVNHKPSNTKVDKKVEPKSCDKTHTCPPSPAPELLGGSSVFLFPPKPKDTLMISRTPEVTCVVVDVSHEDPEVKFNWYVDGVEVHNAKTKPREEQYNSTYRVVSVLTVLHQDWLNGKEYKCKVSNKALPAPIEKTISKAKGQPREPQVYTLPPSRDELTKNQVSLTCLVKGFYPSDIAVEWESNGQPENNYKTTPPVLDSDGSFFLYSKLTVDKSRWQQGNVFSCSVMHEALHNHYTQKSLSLSPG

SEQ ID NO: 282 - protein, 447 aa, Artificial Sequence
  source: /note="Description of Artificial Sequence: Synthetic polypeptide"
QVQLVQSGAEVVKPGASVKLSCKASGYIFTSYYMYWVKQAPGQGLEWIGEINPSNGDTNFNEKFKSKATLTVDKSASTAYMELSSLRSEDTAVYYCTRSDGRNDMDSWGQGTLVTVSSASTKGPSVFPLAPSSKSTSGGTAALGCLVKDYFPEPVTVSWNSGALTSGVHTFPAVLQSSGLYSLSSVVTVPSSSLGTQTYICNVNHKPSNTKVDKKVEPKSCDKTHTSPPCPAPELLGGSSVFLFPPKPKDTLMISRTPEVTCVVVDVSHEDPEVKFNWYVDGVEVHNAKTKPREEQYNSTYRVVSVLTVLHQDWLNGKEYKCKVSNKALPAPIEKTISKAKGQPREPQVYTLPPSRDELTKNQVSLTCLVKGFYPSDIAVEWESNGQPENNYKTTPPVLDSDGSFFLYSKLTVDKSRWQQGNVFSCSVMHEALHNHYTQKSLSLSPG

SEQ ID NO: 283 - protein, 444 aa, Artificial Sequence
  source: /note="Description of Artificial Sequence: Synthetic polypeptide"
QVQLVQSGAEVVKPGASVKLSCKASGYIFTSYYMYWVKQAPGQGLEWIGEINPSNGDTNFNEKFKSKATLTVDKSASTAYMELSSLRSEDTAVYYCTRSDGRNDMDSWGQGTTVTVSSASTKGPSVFPLAPCSRSTSESTAALGCLVKDYFPEPVTVSWNSGALTSGVHTFPAVLQSSGLYSLSSVVTVPSSSLGTKTYTCNVDHKPSNTKVDKRVESKYGPPCPPCPAPEFAGGPSVFLFPPKPKDTLMISRTPEVTCVVVDVSQEDPEVQFNWYVDGVEVHNAKTKPREEQFNSTYRVVSVLTVLHQDWLNGKEYKCKVSNKGLPSSIEKTISKAKGQPREPQVYTLPPSQEEMTKNQVSLTCLVKGFYPSDIAVEWESNGQPENNYKTTPPVLDSDGSFFLYSRLTVDKSRWQEGNVFSCSVMHEALHNHYTQKSLSLSLG

SEQ ID NO: 284 - protein, 445 aa, Artificial Sequence
  source: /note="Description of Artificial Sequence: Synthetic polypeptide"
QVQLVQSGAEVVKPGASVKLSCKASGYIFTSYYMYWVKQAPGQGLEWIGEINPSNGDTNFNEKFKSKATLTVDKSASTAYMELSSLRSEDTAVYYCTRSDGRNDMDSWGQGTLVTVSSASTKGPSVFPLAPCSRSTSESTAALGCLVKDYFPEPVTVSWNSGALTSGVHTFPAVLQSSGLYSLSSVVTVPSSSLGTKTYTCNVDHKPSNTKVDKRVESKYGPPCPPCPAPEFEGGPSVFLFPPKPKDTLMISRTPEVTCVVVDVSQEDPEVQFNWYVDGVEVHNAKTKPREEQFNSTYRVVSVLTVLHQDWLNGKEYKCKVSNKGLPSSIEKTISKAKGQPREPQVYTLPPSQEEMTKNQVSLTCLVKGFYPSDIAVEWESNGQPENNYKTTPPVLDSDGSFFLYSRLTVDKSRWQEGNVFSCSVMHEALHNHYTQKSLSLSLGK

SEQ ID NO: 285 - protein, 445 aa, Artificial Sequence
  source: /note="Description of Artificial Sequence: Synthetic polypeptide"
QVQLVQSGAEVVKPGASVKLSCKASGYIFTSYYMYWVKQAPGQGLEWIGEINPSNGDTNFNEKFKSKATLTVDKSASTAYMELSSLRSEDTAVYYCTRSDGRNDMDSWGQGTLVTVSSASTKGPSVFPLAPCSRSTSESTAALGCLVKDYFPEPVTVSWNSGALTSGVHTFPAVLQSSGLYSLSSVVTVPSSSLGTKTYTCNVDHKPSNTKVDKRVESKYGPPCPPCPAPEAAGGPSVFLFPPKPKDTLMISRTPEVTCVVVDVSQEDPEVQFNWYVDGVEVHNAKTKPREEQFNSTYRVVSVLTVLHQDWLNGKEYKCKVSNKGLPSSIEKTISKAKGQPREPQVYTLPPSQEEMTKNQVSLTCLVKGFYPSDIAVEWESNGQPENNYKTTPPVLDSDGSFFLYSRLTVDKSRWQEGNVFSCSVMHEALHNHYTQKSLSLSLGK

SEQ ID NO: 286 - protein, 448 aa, Artificial Sequence
  source: /note="Description of Artificial Sequence: Synthetic polypeptide"
QVQLVQSGAEVVKPGASVKLSCKASGYIFTSYYMYWVKQAPGQGLEWIGEINPSNGDTNFNEKFKSKATLTVDKSASTAYMELSSLRSEDTAVYYCTRSDGRNDMDSWGQGTLVTVSSASTKGPSVFPLAPSSKSTSGGTAALGCLVKDYFPEPVTVSWNSGALTSGVHTFPAVLQSSGLYSLSSVVTVPSSSLGTQTYICNVNHKPSNTKVDKKVEPKSCDKTHTCPPSPAPELLGGSSVFLFPPKPKDTLMISRTPEVTCVVVDVSHEDPEVKFNWYVDGVEVHNAKTKPREEQYNSTYRVVSVLTVLHQDWLNGKEYKCKVSNKALPAPIEKTISKAKGQPREPQVYTLPPSRDELTKNQVSLTCLVKGFYPSDIAVEWESNGQPENNYKTTPPVLDSDGSFFLYSKLTVDKSRWQQGNVFSCSVMHEALHNHYTQKSLSLSPGK

SEQ ID NO: 287 - protein, 448 aa, Artificial Sequence
  source: /note="Description of Artificial Sequence: Synthetic polypeptide"
QVQLVQSGAEVVKPGASVKLSCKASGYIFTSYYMYWVKQAPGQGLEWIGEINPSNGDTNFNEKFKSKATLTVDKSASTAYMELSSLRSEDTAVYYCTRSDGRNDMDSWGQGTLVTVSSASTKGPSVFPLAPSSKSTSGGTAALGCLVKDYFPEPVTVSWNSGALTSGVHTFPAVLQSSGLYSLSSVVTVPSSSLGTQTYICNVNHKPSNTKVDKKVEPKSCDKTHTSPPCPAPELLGGSSVFLFPPKPKDTLMISRTPEVTCVVVDVSHEDPEVKFNWYVDGVEVHNAKTKPREEQYNSTYRVVSVLTVLHQDWLNGKEYKCKVSNKALPAPIEKTISKAKGQPREPQVYTLPPSRDELTKNQVSLTCLVKGFYPSDIAVEWESNGQPENNYKTTPPVLDSDGSFFLYSKLTVDKSRWQQGNVFSCSVMHEALHNHYTQKSLSLSPGK

SEQ ID NO: 288 - protein, 445 aa, Artificial Sequence
  source: /note="Description of Artificial Sequence: Synthetic polypeptide"
QVQLVQSGAEVVKPGASVKLSCKASGYIFTSYYMYWVKQAPGQGLEWIGEINPSNGDTNFNEKFKSKATLTVDKSASTAYMELSSLRSEDTAVYYCTRSDGRNDMDSWGQGTTVTVSSASTKGPSVFPLAPCSRSTSESTAALGCLVKDYFPEPVTVSWNSGALTSGVHTFPAVLQSSGLYSLSSVVTVPSSSLGTKTYTCNVDHKPSNTKVDKRVESKYGPPCPPCPAPEFAGGPSVFLFPPKPKDTLMISRTPEVTCVVVDVSQEDPEVQFNWYVDGVEVHNAKTKPREEQFNSTYRVVSVLTVLHQDWLNGKEYKCKVSNKGLPSSIEKTISKAKGQPREPQVYTLPPSQEEMTKNQVSLTCLVKGFYPSDIAVEWESNGQPENNYKTTPPVLDSDGSFFLYSRLTVDKSRWQEGNVFSCSVMHEALHNHYTQKSLSLSLGK

SEQ ID NO: 289 - DNA, 1381 bp, Artificial Sequence
  source: /note="Description of Artificial Sequence: Synthetic polynucleotide"
atgcctctgctgctgctgctgcctctgctgtgggccggtgctctggctcaggtccagctggtccagtcaggggctgaagtggtcaaacccggcgccagcgtgaagctgtcttgcaaggcttccggctacatcttcaccagctactatatgtattgggtgaagcaggctccaggacagggcctggagtggatcggcgagatcaacccttccaatggcgacacaaacttcaatgagaagtttaagagcaaggccaccctgacagtggataagagcgcctctaccgcttacatggagctgtccagcctgaggtctgaggacacagccgtgtactattgtaccaggagcgatggccggaacgacatggattcttggggccagggcacactggtgaccgtgtcttccgccagcacaaagggcccttccgtgttccccctggctccttgctccaggagcacatctgagtccaccgccgctctgggctgtctggtgaaggactacttcccagagcccgtgaccgtgtcctggaatagcggcgccctgacatccggagtgcacacctttccagctgtgctgcagagctctggcctgtacagcctgtccagcgtggtgacagtgccctcttccagcctgggcaccaagacatatacctgcaacgtggaccataagccttctaataccaaggtggataagagagtggagtccaagtacggaccaccttgccctagctgtcctgctccagagttcctgggaggaccttccgtgttcctgtttccacccaagccaaaggacacactgatgatctctcgcacacctgaggtgacctgcgtggtggtggacgtgtcccaggagggaccccgaggtgcagttcaactggtacgtggatggcgtggaggtgcacaatgctaagaccaagccaagggaggagcagtttaactccacataccgggtggtgagcgtgctgaccgtgctgcatcaggattggctgaacggcaaggagtataagtgcaaggtgagcaataagggcctgccctcttccatcgagaagacaatctctaaggctaagggacagccaagggagccacaggtgtacaccctgcctccaagccaggaggagatgacaaagaaccaggtgtctctgacctgtctggtgaagggcttctatccatctgacatcgctgtggagtgggagtccaatggccagcccgagaacaattacaagaccacaccccctgtgctggactctgatggctccttctttctgtattctagactgaccgtggataagtcccgctggcaggagggcaacgtgttctcctgctctgtgatgcacgaagcactgcacaatcattacactcagaagagcctgtcactgtccctgggc

SEQ ID NO: 290 - DNA, 1380 bp, Artificial Sequence
  source: /note="Description of Artificial Sequence: Synthetic polynucleotide"
atgcctctgctgctgctgctgcctctgctgtgggccggtgctctggctcaggtccagctggtccagtcaggggctgaagtggtcaaacccggcgccagcgtgaagctgtcttgcaaggcttccggctacatcttcaccagctactatatgtattgggtgaagcaggctccaggacagggcctggagtggatcggcgagatcaacccttccaatggcgacacaaacttcaatgagaagtttaagagcaaggccaccctgacagtggataagagcgcctctaccgcttacatggagctgtccagcctgaggtctgaggacacagccgtgtactattgtaccaggagcgatggccggaacgacatggattcttggggccagggcacactggtgaccgtgtcttccgccagcacaaagggcccttccgtgttccccctggctccttgctccaggagcacatctgagtccaccgccgctctgggctgtctggtgaaggactacttcccagagcccgtgaccgtgtcctggaatagcggcgccctgacatccggagtgcacacctttccagctgtgctgcagagctctggcctgtacagcctgtccagcgtggtgacagtgccctcttccagcctgggcaccaagacatatacctgcaacgtggaccataagccttctaataccaaggtggataagagagtggagtccaagtacggaccaccttgccctccctgtcctgctccagagttcctgggaggaccttccgtgttcctgtttccacccaagccaaaggacacactgatgatctctcgcacacctgaggtgacctgcgtggtggtggacgtgtcccaggaggaccccgaggtgcagttcaactggtacgtggatggcgtggaggtgcacaatgctaagaccaagccaagggaggagcagtttaactccacataccgggtggtgagcgtgctgaccgtgctgcatcaggattggctgaacggcaaggagtataagtgcaaggtgagcaataagggcctgccctcttccatcgagaagacaatctctaaggctaagggacagccaagggagccacaggtgtacaccctgcctccaagccaggaggagatgacaaagaaccaggtgtctctgacctgtctggtgaagggcttctatccatctgacatcgctgtggagtgggagtccaatggccagcccgagaacaattacaagaccacaccccctgtgctggactctgatggctccttctttctgtattctagactgaccgtggataagtcccgctggcaggagggcaacgtgttctcctgctctgtgatgcacgaagcactgcacaatcattacactcagaagagcctgtcactgtccctgggc

SEQ ID NO: 291 - DNA, 1380 bp, Artificial Sequence
  source: /note="Description of Artificial Sequence: Synthetic polynucleotide"
atgcctctgctgctgctgctgcctctgctgtgggccggtgctctggctcaggtccagctggtccagtcaggggctgaagtggtcaaacccggcgccagcgtgaagctgtcttgcaaggcttccggctacatcttcaccagctactatatgtattgggtgaagcaggctccaggacagggcctggagtggatcggcgagatcaacccttccaatggcgacacaaacttcaatgagaagtttaagagcaaggccaccctgacagtggataagagcgcctctaccgcttacatggagctgtccagcctgaggtctgaggacacagccgtgtactattgtaccaggagcgatggccggaacgacatggattcttggggccagggcacactggtgaccgtgtcttccgccagcacaaagggcccttccgtgttccccctggctccttgctccaggagcacatctgagtccaccgccgctctgggctgtctggtgaaggactacttcccagagcccgtgaccgtgtcctggaatagcggcgccctgacatccggagtgcacacctttccagctgtgctgcagagctctggcctgtacagcctgtccagcgtggtgacagtgccctcttccagcctgggcaccaagacatatacctgcaacgtggaccataagccttctaataccaaggtggataagagagtggagtccaagtacggaccaccttgccctccctgtcctgctccagagttcgagggaggaccttccgtgttcctgtttccacccaagccaaaggacacactgatgatctctcgcacacctgaggtgacctgcgtggtggtggacgtgtcccaggaggaccccgaggtgcagttcaactggtacgtggatggcgtggaggtgcacaatgctaagaccaagccaagggaggagcagtttaactccacataccgggtggtgagcgtgctgaccgtgctgcatcaggattggctgaacggcaaggagtataagtgcaaggtgagcaataagggcctgccctcttccatcgagaagacaatctctaaggctaagggacagccaagggagccacaggtgtacaccctgcctccaagccaggaggagatgacaaagaaccaggtgtctctgacctgtctggtgaagggcttctatccatctgacatcgctgtggagtgggagtccaatggccagcccgagaacaattacaagaccacaccccctgtgctggactctgatggctccttctttctgtattctagactgaccgtggataagtcccgctggcaggagggcaacgtgttctcctgctctgtgatgcacgaagcactgcacaatcattacactcagaagagcctgtcactgtccctgggc

SEQ ID NO: 292 - DNA, 1380 bp, Artificial Sequence
  source: /note="Description of Artificial Sequence: Synthetic polynucleotide"
atgcctctgctgctgctgctgcctctgctgtgggccggtgctctggctcaggtccagctggtccagtcaggggctgaagtggtcaaacccggcgccagcgtgaagctgtcttgcaaggcttccggctacatcttcaccagctactatatgtattgggtgaagcaggctccaggacagggcctggagtggatcggcgagatcaacccttccaatggcgacacaaacttcaatgagaagtttaagagcaaggccaccctgacagtggataagagcgcctctaccgcttacatggagctgtccagcctgaggtctgaggacacagccgtgtactattgtaccaggagcgatggccggaacgacatggattcttggggccagggcacactggtgaccgtgtcttccgccagcacaaagggcccttccgtgttccccctggctccttgctccaggagcacatctgagtccaccgccgctctgggctgtctggtgaaggactacttcccagagcccgtgaccgtgtcctggaatagcggcgccctgacatccggagtgcacacctttccagctgtgctgcagagctctggcctgtacagcctgtccagcgtggtgacagtgccctcttccagcctgggcaccaagacatatacctgcaacgtggaccataagccttctaataccaaggtggataagagagtggagtccaagtacggaccaccttgccctccctgtcctgctccagaggccgccggaggaccttccgtgttcctgtttccacccaagccaaaggacacactgatgatctctcgcacacctgaggtgacctgcgtggtggtggacgtgtcccaggaggaccccgaggtgcagttcaactggtacgtggatggcgtggaggtgcacaatgctaagaccaagccaagggaggagcagtttaactccacataccgggtggtgagcgtgctgaccgtgctgcatcaggattggctgaacggcaaggagtataagtgcaaggtgagcaataagggcctgccctcttccatcgagaagacaatctctaaggctaagggacagccaagggagccacaggtgtacaccctgcctccaagccaggaggagatgacaaagaaccaggtgtctctgacctgtctggtgaagggcttctatccatctgacatcgctgtggagtgggagtccaatggccagcccgagaacaattacaagaccacaccccctgtgctggactctgatggctccttctttctgtattctagactgaccgtggataagtcccgctggcaggagggcaacgtgttctcctgctctgtgatgcacgaagcactgcacaatcattacactcagaagagcctgtcactgtccctgggc

SEQ ID NO: 293 - DNA, 1389 bp, Artificial Sequence
  source: /note="Description of Artificial Sequence: Synthetic polynucleotide"
atgcctctgctgctgctgctgcctctgctgtgggccggtgccctggctcaggtccagctggtccagtcaggtgccgaagtggtcaagcccggcgcctctgtgaagctgtcctgcaaggctagcggctacatcttcacctcctactatatgtattgggtgaagcaggctcctggacagggcctggagtggatcggcgagatcaacccatctaatggcgacaccaacttcaatgagaagtttaagtccaaggccaccctgacagtggataagagcgcctctacagcttacatggagctgtccagcctgaggagcgaggacaccgccgtgtactattgcacaaggtctgatggccggaacgacatggattcctggggccagggcaccctggtgacagtgtcttccgcctctaccaagggcccttccgtgtttccactggctcccagctctaagtccaccagcggaggaacagccgctctgggctgtctggtgaaggactacttcccagagcccgtgacagtgagctggaactctggcgccctgaccagcggagtgcacacatttcctgctgtgctgcagtccagcggcctgtactctctgtcttccgtggtgaccgtgccaagctcttccctgggcacccagacatatatctgcaacgtgaatcacaagccaagcaatacaaaggtggacaagaaggtggagcccaagtcttgtgataagacccatacatgccccccttgtcctgctccagaggctgctggaggaccatccgtgttcctgtttccacccaagcctaaggacaccctgatgatctccagaaccccagaggtgacatgcgtggtggtggacgtgagccacgaggaccccgaggtgaagttcaactggtacgtggatggcgtggaggtgcataatgctaagaccaagccaagagaggagcagtacaacagcacctatcgcgtggtgtctgtgctgacagtgctgcatcaggactggctgaacggcaaggagtataagtgcaaggtgtctaataaggccctgcccgctcctatcgagaagaccatctccaaggccaagggccagcctagggagccacaggtgtacacactgcctccatcccgggacgagctgaccaagaaccaggtgagcctgacatgtctggtgaagggcttctatcccagcgatatcgctgtggagtgggagtctaatggccagcctgagaacaattacaagaccacaccccctgtgctggactccgatggcagcttctttctgtattccaagctgaccgtggataagagccgctggcagcagggcaacgtgttctcctgttccgtcatgcacgaggcactgcacaatcattacacccagaagtcactgtcactgtcaccagga

SEQ ID NO: 294 - DNA, 1389 bp, Artificial Sequence
  source: /note="Description of Artificial Sequence: Synthetic polynucleotide"
atgcctctgctgctgctgctgcctctgctgtgggccggtgccctggctcaggtccagctggtccagtcaggtgccgaagtggtcaagcccggcgcctctgtgaagctgtcctgcaaggctagcggctacatcttcacctcctactatatgtattgggtgaagcaggctcctggacagggcctggagtggatcggcgagatcaacccatctaatggcgacaccaacttcaatgagaagtttaagtccaaggccaccctgacagtggataagagcgcctctacagcttacatggagctgtccagcctgaggagcgaggacaccgccgtgtactattgcacaaggtctgatggccggaacgacatggattcctggggccagggcaccctggtgacagtgtcttccgcctctaccaagggcccttccgtgtttccactggctcccagctctaagtccaccagcggaggaacagccgctctgggctgtctggtgaaggactacttcccagagcccgtgacagtgagctggaactctggcgccctgaccagcggagtgcacacatttcctgctgtgctgcagtccagcggcctgtactctctgtcttccgtggtgaccgtgccaagctcttccctgggcacccagacatatatctgcaacgtgaatcacaagccaagcaatacaaaggtggacaagaaggtggagcccaagtcttgtgataagacccatacatcccccccttcccctgctccagagctgctgggaggaagctccgtgttcctgtttccacccaagcctaaggacaccctgatgatctccagaaccccagaggtgacatgcgtggtggtggacgtgagccacgaggaccccgaggtgaagttcaactggtacgtggatggcgtggaggtgcataatgctaagaccaagccaagagaggagcagtacaacagcacctatcgcgtggtgtctgtgctgacagtgctgcatcaggactggctgaacggcaaggagtataagtgcaaggtgtctaataaggccctgcccgctcctatcgagaagaccatctccaaggccaagggccagcctagggagccacaggtgtacacactgcctccatcccgggacgagctgaccaagaaccaggtgagcctgacatgtctggtgaagggcttctatcccagcgatatcgctgtggagtgggagtctaatggccagcctgagaacaattacaagaccacaccccctgtgctggactccgatggcagcttctttctgtattccaagctgaccgtggataagagccgctggcagcagggcaacgtgttctcctgttccgtcatgcacgaggcactgcacaatcattacacccagaagtcactgtcactgtcaccagga

SEQ ID NO: 295 - DNA, 1389 bp, Artificial Sequence
  source: /note="Description of Artificial Sequence: Synthetic polynucleotide"
atgcctctgctgctgctgctgcctctgctgtgggccggtgccctggctcaggtccagctggtccagtcaggtgccgaagtggtcaagcccggcgcctctgtgaagctgtcctgcaaggctagcggctacatcttcacctcctactatatgtattgggtgaagcaggctcctggacagggcctggagtggatcggcgagatcaacccatctaatggcgacaccaacttcaatgagaagtttaagtccaaggccaccctgacagtggataagagcgcctctacagcttacatggagctgtccagcctgaggagcgaggacaccgccgtgtactattgcacaaggtctgatggccggaacgacatggattcctggggccagggcaccctggtgacagtgtcttccgcctctaccaagggcccttccgtgtttccactggctcccagctctaagtccaccagcggaggaacagccgctctgggctgtctggtgaaggactacttcccagagcccgtgacagtgagctggaactctggcgccctgaccagcggagtgcacacatttcctgctgtgctgcagtccagcggcctgtactctctgtcttccgtggtgaccgtgccaagctcttccctgggcacccagacatatatctgcaacgtgaatcacaagccaagcaatacaaaggtggacaagaaggtggagcccaagtcttgtgataagacccatacatgccccccttcccctgctccagagctgctgggaggaagctccgtgttcctgtttccacccaagcctaaggacaccctgatgatctccagaaccccagaggtgacatgcgtggtggtggacgtgagccacgaggaccccgaggtgaagttcaactggtacgtggatggcgtggaggtgcataatgctaagaccaagccaagagaggagcagtacaacagcacctatcgcgtggtgtctgtgctgacagtgctgcatcaggactggctgaacggcaaggagtataagtgcaaggtgtctaataaggccctgcccgctcctatcgagaagaccatctccaaggccaagggccagcctagggagccacaggtgtacacactgcctccatcccgggacgagctgaccaagaaccaggtgagcctgacatgtctggtgaagggcttctatcccagcgatatcgctgtggagtgggagtctaatggccagcctgagaacaattacaagaccacaccccctgtgctggactccgatggcagcttctttctgtattccaagctgaccgtggataagagccgctggcagcagggcaacgtgttctcctgttccgtcatgcacgaggcactgcacaatcattacacccagaagtcactgtcactgtcaccagga

SEQ ID NO: 296 - DNA, 1389 bp, Artificial Sequence
  source: /note="Description of Artificial Sequence: Synthetic polynucleotide"
atgcctctgctgctgctgctgcctctgctgtgggccggtgccctggctcaggtccagctggtccagtcaggtgccgaagtggtcaagcccggcgcctctgtgaagctgtcctgcaaggctagcggctacatcttcacctcctactatatgtattgggtgaagcaggctcctggacagggcctggagtggatcggcgagatcaacccatctaatggcgacaccaacttcaatgagaagtttaagtccaaggccaccctgacagtggataagagcgcctctacagcttacatggagctgtccagcctgaggagcgaggacaccgccgtgtactattgcacaaggtctgatggccggaacgacatggattcctggggccagggcaccctggtgacagtgtcttccgcctctaccaagggcccttccgtgtttccactggctcccagctctaagtccaccagcggaggaacagccgctctgggctgtctggtgaaggactacttcccagagcccgtgacagtgagctggaactctggcgccctgaccagcggagtgcacacatttcctgctgtgctgcagtccagcggcctgtactctctgtcttccgtggtgaccgtgccaagctcttccctgggcacccagacatatatctgcaacgtgaatcacaagccaagcaatacaaaggtggacaagaaggtggagcccaagtcttgtgataagacccatacatcccccccttgccctgctccagagctgctgggaggaagctccgtgttcctgtttccacccaagcctaaggacaccctgatgatctccagaaccccagaggtgacatgcgtggtggtggacgtgagccacgaggaccccgaggtgaagttcaactggtacgtggatggcgtggaggtgcataatgctaagaccaagccaagagaggagcagtacaacagcacctatcgcgtggtgtctgtgctgacagtgctgcatcaggactggctgaacggcaaggagtataagtgcaaggtgtctaataaggccctgcccgctcctatcgagaagaccatctccaaggccaagggccagcctagggagccacaggtgtacacactgcctccatcccgggacgagctgaccaagaaccaggtgagcctgacatgtctggtgaagggcttctatcccagcgatatcgctgtggagtgggagtctaatggccagcctgagaacaattacaagaccacaccccctgtgctggactccgatggcagcttctttctgtattccaagctgaccgtggataagagccgctggcagcagggcaacgtgttctcctgttccgtcatgcacgaggcactgcacaatcattacacccagaagtcactgtcactgtcaccagga

SEQ ID NO: 297 - DNA, 1380 bp, Artificial Sequence
  source: /note="Description of Artificial Sequence: Synthetic polynucleotide"
atgcctctgctgctgctgctgcctctgctgtgggccggtgctctggctcaggtccagctggtccagtcaggggctgaagtggtcaaacccggcgccagcgtgaagctgtcttgcaaggcttccggctacatcttcaccagctactatatgtattgggtgaagcaggctccaggacagggcctggagtggatcggcgagatcaacccttccaatggcgacacaaacttcaatgagaagtttaagagcaaggccaccctgacagtggataagagcgcctctaccgcttacatggagctgtccagcctgaggtctgaggacacagccgtgtactattgtaccaggagcgatggccggaacgacatggattcttggggccagggcacaacagtgaccgtgtcttccgccagcacaaagggcccttccgtgttccccctggctccttgctccaggagcacatctgagtccaccgccgctctgggctgtctggtgaaggactacttcccagagcccgtgaccgtgtcctggaatagcggcgccctgacatccggagtgcacacctttccagctgtgctgcagagctctggcctgtacagcctgtccagcgtggtgacagtgccctcttccagcctgggcaccaagacatatacctgcaacgtggaccataagccttctaataccaaggtggataagagagtggagtccaagtacggaccaccttgccctccttgtcctgctccagagttcgccggaggaccttccgtgttcctgtttccacccaagccaaaggacacactgatgatctctcgcacacctgaggtgacctgcgtggtggtggacgtgtcccaggaggaccccgaggtgcagttcaactggtacgtggatggcgtggaggtgcacaatgctaagaccaagccaagggaggagcagtttaactccacataccgggtggtgagcgtgctgaccgtgctgcatcaggattggctgaacggcaaggagtataagtgcaaggtgagcaataagggcctgccctcttccatcgagaagacaatctctaaggctaagggacagccaagggagccacaggtgtacaccctgcctccaagccaggaggagatgacaaagaaccaggtgtctctgacctgtctggtgaagggcttctatccatctgacatcgctgtggagtgggagtccaatggccagcccgagaacaattacaagaccacaccccctgtgctggactctgatggctccttctttctgtattctagactgaccgtggataagtcccgctggcaggagggcaacgtgttctcctgctctgtgatgcacgaagcactgcacaatcattacactcagaagagcctgtcactgtccctgggc

SEQ ID NO: 298 - DNA, 1332 bp, Artificial Sequence
  source: /note="Description of Artificial Sequence: Synthetic polynucleotide"
caggtccagctggtccagtcaggggctgaagtggtcaaacccggcgccagcgtgaagctgtcttgcaaggcttccggctacatcttcaccagctactatatgtattgggtgaagcaggctccaggacagggcctggagtggatcggcgagatcaacccttccaatggcgacacaaacttcaatgagaagtttaagagcaaggccaccctgacagtggataagagcgcctctaccgcttacatggagctgtccagcctgaggtctgaggacacagccgtgtactattgtaccaggagcgatggccggaacgacatggattcttggggccagggcacactggtgaccgtgtcttccgccagcacaaagggcccttccgtgttccccctggctccttgctccaggagcacatctgagtccaccgccgctctgggctgtctggtgaaggactacttcccagagcccgtgaccgtgtcctggaatagcggcgccctgacatccggagtgcacacctttccagctgtgctgcagagctctggcctgtacagcctgtccagcgtggtgacagtgccctcttccagcctgggcaccaagacatatacctgcaacgtggaccataagccttctaataccaaggtggataagagagtggagtccaagtacggaccaccttgccctagctgtcctgctccagagttcctgggaggaccttccgtgttcctgtttccacccaagccaaaggacacactgatgatctctcgcacacctgaggtgacctgcgtggtggtggacgtgtcccaggaggaccccgaggtgcagttcaactggtacgtggatggcgtggaggtgcacaatgctaagaccaagccaagggaggagcagtttaactccacataccgggtggtgagcgtgctgaccgtgctgcatcaggattggctgaacggcaaggagtataagtgcaaggtgagcaataagggcctgccctcttccatcgagaagacaatctctaaggctaagggacagccaagggagccacaggtgtacaccctgcctccaagccaggaggagatgacaaagaaccaggtgtctctgacctgtctggtgaagggcttctatccatctgacatcgctgtggagtgggagtccaatggccagcccgagaacaattacaagaccacaccccctgtgctggactctgatggctccttctttctgtattctagactgaccgtggataagtcccgctggcaggagggcaacgtgttctcctgctctgtgatgcacgaagcactgcacaatcattacactcagaagagcctgtcactgtccctgggc

SEQ ID NO: 299 - DNA, 1332 bp, Artificial Sequence
  source: /note="Description of Artificial Sequence: Synthetic polynucleotide"
caggtccagctggtccagtcaggggctgaagtggtcaaacccggcgccagcgtgaagctgtcttgcaaggcttccggctacatcttcaccagctactatatgtattgggtgaagcaggctccaggacagggcctggagtggatcggcgagatcaacccttccaatggcgacacaaacttcaatgagaagtttaagagcaaggccaccctgacagtggataagagcgcctctaccgcttacatggagctgtccagcctgaggtctgaggacacagccgtgtactattgtaccaggagcgatggccggaacgacatggattcttggggccagggcacactggtgaccgtgtcttccgccagcacaaagggcccttccgtgttccccctggctccttgctccaggagcacatctgagtccaccgccgctctgggctgtctggtgaaggactacttcccagagcccgtgaccgtgtcctggaatagcggcgccctgacatccggagtgcacacctttccagctgtgctgcagagctctggcctgtacagcctgtccagcgtggtgacagtgccctcttccagcctgggcaccaagacatatacctgcaacgtggaccataagccttctaataccaaggtggataagagagtggagtccaagtacggaccaccttgccctccctgtcctgctccagagttcctgggaggaccttccgtgttcctgtttccacccaagccaaaggacacactgatgatctctcgcacacctgaggtgacctgcgtggtggtggacgtgtcccaggaggaccccgaggtgcagttcaactggtacgtggatggcgtggaggtgcacaatgctaagaccaagccaagggaggagcagtttaactccacataccgggtggtgagcgtgctgaccgtgctgcatcaggattggctgaacggcaaggagtataagtgcaaggtgagcaataagggcctgccctcttccatcgagaagacaatctctaaggctaagggacagccaagggagccacaggtgtacaccctgcctccaagccaggaggagatgacaaagaaccaggtgtctctgacctgtctggtgaagggcttctatccatctgacatcgctgtggagtgggagtccaatggccagcccgagaacaattacaagaccacaccccctgtgctggactctgatggctccttctttctgtattctagactgaccgtggataagtcccgctggcaggagggcaacgtgttctcctgctctgtgatgcacgaagcactgcacaatcattacactcagaagagcctgtcactgtccctgggc

SEQ ID NO: 300 - DNA, 1332 bp, Artificial Sequence
  source: /note="Description of Artificial Sequence: Synthetic polynucleotide"
caggtccagctggtccagtcaggggctgaagtggtcaaacccggcgccagcgtgaagctgtcttgcaaggcttccggctacatcttcaccagctactatatgtattgggtgaagcaggctccaggacagggcctggagtggatcggcgagatcaacccttccaatggcgacacaaacttcaatgagaagtttaagagcaaggccaccctgacagtggataagagcgcctctaccgcttacatggagctgtccagcctgaggtctgaggacacagccgtgtactattgtaccaggagcgatggccggaacgacatggattcttggggccagggcacactggtgaccgtgtcttccgccagcacaaagggcccttccgtgttccccctggctccttgctccaggagcacatctgagtccaccgccgctctgggctgtctggtgaaggactacttcccagagcccgtgaccgtgtcctggaatagcggcgccctgacatccggagtgcacacctttccagctgtgctgcagagctctggcctgtacagcctgtccagcgtggtgacagtgccctcttccagcctgggcaccaagacatatacctgcaacgtggaccataagccttctaataccaaggtggataagagagtggagtccaagtacggaccaccttgccctccctgtcctgctccagagttcgagggaggaccttccgtgttcctgtttccacccaagccaaaggacacactgatgatctctcgcacacctgaggtgacctgcgtggtggtggacgtgtcccaggaggaccccgaggtgcagttcaactggtacgtggatggcgtggaggtgcacaatgctaagaccaagccaagggaggagcagtttaactccacataccgggtggtgagcgtgctgaccgtgctgcatcaggattggctgaacggcaaggagtataagtgcaaggtgagcaataagggcctgccctcttccatcgagaagacaatctctaaggctaagggacagccaagggagccacaggtgtacaccctgcctccaagccaggaggagatgacaaagaaccaggtgtctctgacctgtctggtgaagggcttctatccatctgacatcgctgtggagtgggagtccaatggccagcccgagaacaattacaagaccacaccccctgtgctggactctgatggctccttctttctgtattctagactgaccgtggataagtcccgctggcaggagggcaacgtgttctcctgctctgtgatgcacgaagcactgcacaatcattacactcagaagagcctgtcactgtccctgggc

SEQ ID NO: 301 - DNA, 1332 bp, Artificial Sequence
  source: /note="Description of Artificial Sequence: Synthetic polynucleotide"
caggtccagctggtccagtcaggggctgaagtggtcaaacccggcgccagcgtgaagctgtcttgcaaggcttccggctacatcttcaccagctactatatgtattgggtgaagcaggctccaggacagggcctggagtggatcggcgagatcaacccttccaatggcgacacaaacttcaatgagaagtttaagagcaaggccaccctgacagtggataagagcgcctctaccgcttacatggagctgtccagcctgaggtctgaggacacagccgtgtactattgtaccaggagcgatggccggaacgacatggattcttggggccagggcacactggtgaccgtgtcttccgccagcacaaagggcccttccgtgttccccctggctccttgctccaggagcacatctgagtccaccgccgctctgggctgtctggtgaaggactacttcccagagcccgtgaccgtgtcctggaatagcggcgccctgacatccggagtgcacacctttccagctgtgctgcagagctctggcctgtacagcctgtccagcgtggtgacagtgccctcttccagcctgggcaccaagacatatacctgcaacgtggaccataagccttctaataccaaggtggataagagagtggagtccaagtacggaccaccttgccctccctgtcctgctccagaggccgccggaggaccttccgtgttcctgtttccacccaagccaaaggacacactgatgatctctcgcacacctgaggtgacctgcgtggtggtggacgtgtcccaggaggaccccgaggtgcagttcaactggtacgtggatggcgtggaggtgcacaatgctaagaccaagccaagggaggagcagtttaactccacataccgggtggtgagcgtgctgaccgtgctgcatcaggattggctgaacggcaaggagtataagtgcaaggtgagcaataagggcctgccctcttccatcgagaagacaatctctaaggctaagggacagccaagggagccacaggtgtacaccctgcctccaagccaggaggagatgacaaagaaccaggtgtctctgacctgtctggtgaagggcttctatccatctgacatcgctgtggagtgggagtccaatggccagcccgagaacaattacaagaccacaccccctgtgctggactctgatggctccttctttctgtattctagactgaccgtggataagtcccgctggcaggagggcaacgtgttctcctgctctgtgatgcacgaagcactgcacaatcattacactcagaagagcctgtcactgtccctgggc

SEQ ID NO: 302 - DNA, 1341 bp, Artificial Sequence
  source: /note="Description of Artificial Sequence: Synthetic polynucleotide"
caggtccagctggtccagtcaggtgccgaagtggtcaagcccggcgcctctgtgaagctgtcctgcaaggctagcggctacatcttcacctcctactatatgtattgggtgaagcaggctcctggacagggcctggagtggatcggcgagatcaacccatctaatggcgacaccaacttcaatgagaagtttaagtccaaggccaccctgacagtggataagagcgcctctacagcttacatggagctgtccagcctgaggagcgaggacaccgccgtgtactattgcacaaggtctgatggccggaacgacatggattcctggggccagggcaccctggtgacagtgtcttccgcctctaccaagggcccttccgtgtttccactggctcccagctctaagtccaccagcggaggaacagccgctctgggctgtctggtgaaggactacttcccagagcccgtgacagtgagctggaactctggcgccctgaccagcggagtgcacacatttcctgctgtgctgcagtccagcggcctgtactctctgtcttccgtggtgaccgtgccaagctcttccctgggcacccagacatatatctgcaacgtgaatcacaagccaagcaatacaaaggtggacaagaaggtggagcccaagtcttgtgataagacccatacatgccccccttgtcctgctccagaggctgctggaggaccatccgtgttcctgtttccacccaagcctaaggacaccctgatgatctccagaaccccagaggtgacatgcgtggtggtggacgtgagccacgaggaccccgaggtgaagttcaactggtacgtggatggcgtggaggtgcataatgctaagaccaagccaagagaggagcagtacaacagcacctatcgcgtggtgtctgtgctgacagtgctgcatcaggactggctgaacggcaaggagtataagtgcaaggtgtctaataaggccctgcccgctcctatcgagaagaccatctccaaggccaagggccagcctagggagccacaggtgtacacactgcctccatcccgggacgagctgaccaagaaccaggtgagcctgacatgtctggtgaagggcttctatcccagcgatatcgctgtggagtgggagtctaatggccagcctgagaacaattacaagaccacaccccctgtgctggactccgatggcagcttctttctgtattccaagctgaccgtggataagagccgctggcagcagggcaacgtgttctcctgttccgtcatgcacgaggcactgcacaatcattacacccagaagtcactgtcactgtcaccagga

SEQ ID NO: 303 - DNA, 1341 bp, Artificial Sequence
  source: /note="Description of Artificial Sequence: Synthetic polynucleotide"
caggtccagctggtccagtcaggtgccgaagtggtcaagcccggcgcctctgtgaagctgtcctgcaaggctagcggctacatcttcacctcctactatatgtattgggtgaagcaggctcctggacagggcctggagtggatcggcgagatcaacccatctaatggcgacaccaacttcaatgagaagtttaagtccaaggccaccctgacagtggataagagcgcctctacagcttacatggagctgtccagcctgaggagcgaggacaccgccgtgtactattgcacaaggtctgatggccggaacgacatggattcctggggccagggcaccctggtgacagtgtcttccgcctctaccaagggcccttccgtgtttccactggctcccagctctaagtccaccagcggaggaacagccgctctgggctgtctggtgaaggactacttcccagagcccgtgacagtgagctggaactctggcgccctgaccagcggagtgcacacatttcctgctgtgctgcagtccagcggcctgtactctctgtcttccgtggtgaccgtgccaagctcttccctgggcacccagacatatatctgcaacgtgaatcacaagccaagcaatacaaaggtggacaagaaggtggagcccaagtcttgtgataagacccatacatcccccccttcccctgctccagagctgctgggaggaagctccgtgttcctgtttccacccaagcctaaggacaccctgatgatctccagaaccccagaggtgacatgcgtggtggtggacgtgagccacgaggaccccgaggtgaagttcaactggtacgtggatggcgtggaggtgcataatgctaagaccaagccaagagaggagcagtacaacagcacctatcgcgtggtgtctgtgctgacagtgctgcatcaggactggctgaacggcaaggagtataagtgcaaggtgtctaataaggccctgcccgctcctatcgagaagaccatctccaaggccaagggccagcctagggagccacaggtgtacacactgcctccatcccgggacgagctgaccaagaaccaggtgagcctgacatgtctggtgaagggcttctatcccagcgatatcgctgtggagtgggagtctaatggccagcctgagaacaattacaagaccacaccccctgtgctggactccgatggcagcttctttctgtattccaagctgaccgtggataagagccgctggcagcagggcaacgtgttctcctgttccgtcatgcacgaggcactgcacaatcattacacccagaagtcactgtcactgtcaccagga

SEQ ID NO: 304 - DNA, 1341 bp, Artificial Sequence
  source: /note="Description of Artificial Sequence: Synthetic polynucleotide"
caggtccagctggtccagtcaggtgccgaagtggtcaagcccggcgcctctgtgaagctgtcctgcaaggctagcggctacatcttcacctcctactatatgtattgggtgaagcaggctcctggacagggcctggagtggatcggcgagatcaacccatctaatggcgacaccaacttcaatgagaagtttaagtccaaggccaccctgacagtggataagagcgcctctacagcttacatggagctgtccagcctgaggagcgaggacaccgccgtgtactattgcacaaggtctgatggccggaacgacatggattcctggggccagggcaccctggtgacagtgtcttccgcctctaccaagggcccttccgtgtttccactggctcccagctctaagtccaccagcggaggaacagccgctctgggctgtctggtgaaggactacttcccagagcccgtgacagtgagctggaactctggcgccctgaccagcggagtgcacacatttcctgctgtgctgcagtccagcggcctgtactctctgtcttccgtggtgaccgtgccaagctcttccctgggcacccagacatatatctgcaacgtgaatcacaagccaagcaatacaaaggtggacaagaaggtggagcccaagtcttgtgataagacccatacatgccccccttcccctgctccagagctgctgggaggaagctccgtgttcctgtttccacccaagcctaaggacaccctgatgatctccagaaccccagaggtgacatgcgtggtggtggacgtgagccacgaggaccccgaggtgaagttcaactggtacgtggatggcgtggaggtgcataatgctaagaccaagccaagagaggagcagtacaacagcacctatcgcgtggtgtctgtgctgacagtgctgcatcaggactggctgaacggcaaggagtataagtgcaaggtgtctaataaggccctgcccgctcctatcgagaagaccatctccaaggccaagggccagcctagggagccacaggtgtacacactgcctccatcccgggacgagctgaccaagaaccaggtgagcctgacatgtctggtgaagggcttctatcccagcgatatcgctgtggagtgggagtctaatggccagcctgagaacaattacaagaccacaccccctgtgctggactccgatggcagcttctttctgtattccaagctgaccgtggataagagccgctggcagcagggcaacgtgttctcctgttccgtcatgcacgaggcactgcacaatcattacacccagaagtcactgtcactgtcaccagga

SEQ ID NO: 305 - DNA, 1341 bp, Artificial Sequence
  source: /note="Description of Artificial Sequence: Synthetic polynucleotide"
caggtccagctggtccagtcaggtgccgaagtggtcaagcccggcgcctctgtgaagctgtcctgcaaggctagcggctacatcttcacctcctactatatgtattgggtgaagcaggctcctggacagggcctggagtggatcggcgagatcaacccatctaatggcgacaccaacttcaatgagaagtttaagtccaaggccaccctgacagtggataagagcgcctctacagcttacatggagctgtccagcctgaggagcgaggacaccgccgtgtactattgcacaaggtctgatggccggaacgacatggattcctggggccagggcaccctggtgacagtgtcttccgcctctaccaagggcccttccgtgtttccactggctcccagctctaagtccaccagcggaggaacagccgctctgggctgtctggtgaaggactacttcccagagcccgtgacagtgagctggaactctggcgccctgaccagcggagtgcacacatttcctgctgtgctgcagtccagcggcctgtactctctgtcttccgtggtgaccgtgccaagctcttccctgggcacccagacatatatctgcaacgtgaatcacaagccaagcaatacaaaggtggacaagaaggtggagcccaagtcttgtgataagacccatacatcccccccttgccctgctccagagctgctgggaggaagctccgtgttcctgtttccacccaagcctaaggacaccctgatgatctccagaaccccagaggtgacatgcgtggtggtggacgtgagccacgaggaccccgaggtgaagttcaactggtacgtggatggcgtggaggtgcataatgctaagaccaagccaagagaggagcagtacaacagcacctatcgcgtggtgtctgtgctgacagtgctgcatcaggactggctgaacggcaaggagtataagtgcaaggtgtctaataaggccctgcccgctcctatcgagaagaccatctccaaggccaagggccagcctagggagccacaggtgtacacactgcctccatcccgggacgagctgaccaagaaccaggtgagcctgacatgtctggtgaagggcttctatcccagcgatatcgctgtggagtgggagtctaatggccagcctgagaacaattacaagaccacaccccctgtgctggactccgatggcagcttctttctgtattccaagctgaccgtggataagagccgctggcagcagggcaacgtgttctcctgttccgtcatgcacgaggcactgcacaatcattacacccagaagtcactgtcactgtcaccagga

SEQ ID NO: 306 - DNA, 1332 bp, Artificial Sequence
  source: /note="Description of Artificial Sequence: Synthetic polynucleotide"
caggtccagctggtccagtcaggggctgaagtggtcaaacccggcgccagcgtgaagctgtcttgcaaggcttccggctacatcttcaccagctactatatgtattgggtgaagcaggctccaggacagggcctggagtggatcggcgagatcaacccttccaatggcgacacaaacttcaatgagaagtttaagagcaaggccaccctgacagtggataagagcgcctctaccgcttacatggagctgtccagcctgaggtctgaggacacagccgtgtactattgtaccaggagcgatggccggaacgacatggattcttggggccagggcacaacagtgaccgtgtcttccgccagcacaaagggcccttccgtgttccccctggctccttgctccaggagcacatctgagtccaccgccgctctgggctgtctggtgaaggactacttcccagagcccgtgaccgtgtcctggaatagcggcgccctgacatccggagtgcacacctttccagctgtgctgcagagctctggcctgtacagcctgtccagcgtggtgacagtgccctcttccagcctgggcaccaagacatatacctgcaacgtggaccataagccttctaataccaaggtggataagagagtggagtccaagtacggaccaccttgccctccttgtcctgctccagagttcgccggaggaccttccgtgttcctgtttccacccaagccaaaggacacactgatgatctctcgcacacctgaggtgacctgcgtggtggtggacgtgtcccaggaggaccccgaggtgcagttcaactggtacgtggatggcgtggaggtgcacaatgctaagaccaagccaagggaggagcagtttaactccacataccgggtggtgagcgtgctgaccgtgctgcatcaggattggctgaacggcaaggagtataagtgcaaggtgagcaataagggcctgccctcttccatcgagaagacaatctctaaggctaagggacagccaagggagccacaggtgtacaccctgcctccaagccaggaggagatgacaaagaaccaggtgtctctgacctgtctggtgaagggcttctatccatctgacatcgctgtggagtgggagtccaatggccagcccgagaacaattacaagaccacaccccctgtgctggactctgatggctccttctttctgtattctagactgaccgtggataagtcccgctggcaggagggcaacgtgttctcctgctctgtgatgcacgaagcactgcacaatcattacactcagaagagcctgtcactgtccctgggc

SEQ ID NO: 307 - DNA, 1335 bp, Artificial Sequence
  source: /note="Description of Artificial Sequence: Synthetic polynucleotide"
caggtccagctggtccagtcaggggctgaagtggtcaaacccggcgccagcgtgaagctgtcttgcaaggcttccggctacatcttcaccagctactatatgtattgggtgaagcaggctccaggacagggcctggagtggatcggcgagatcaacccttccaatggcgacacaaacttcaatgagaagtttaagagcaaggccaccctgacagtggataagagcgcctctaccgcttacatggagctgtccagcctgaggtctgaggacacagccgtgtactattgtaccaggagcgatggccggaacgacatggattcttggggccagggcacactggtgaccgtgtcttccgccagcacaaagggcccttccgtgttccccctggctccttgctccaggagcacatctgagtccaccgccgctctgggctgtctggtgaaggactacttcccagagcccgtgaccgtgtcctggaatagcggcgccctgacatccggagtgcacacctttccagctgtgctgcagagctctggcctgtacagcctgtccagcgtggtgacagtgccctcttccagcctgggcaccaagacatatacctgcaacgtggaccataagccttctaataccaaggtggataagagagtggagtccaagtacggaccaccttgccctagctgtcctgctccagagttcctgggaggaccttccgtgttcctgtttccacccaagccaaaggacacactgatgatctctcgcacacctgaggtgacctgcgtggtggtggacgtgtcccaggaggaccccgaggtgcagttcaactggtacgtggatggcgtggaggtgcacaatgctaagaccaagccaagggaggagcagtttaactccacataccgggtggtgagcgtgctgaccgtgctgcatcaggattggctgaacggcaaggagtataagtgcaaggtgagcaataagggcctgccctcttccatcgagaagacaatctctaaggctaagggacagccaagggagccacaggtgtacaccctgcctccaagccaggaggagatgacaaagaaccaggtgtctctgacctgtctggtgaagggcttctatccatctgacatcgctgtggagtgggagtccaatggccagcccgagaacaattacaagaccacaccccctgtgctggactctgatggctccttctttctgtattctagactgaccgtggataagtcccgctggcaggagggcaacgtgttctcctgctctgtgatgcacgaagcactgcacaatcattacactcagaagagcctgtcactgtccctgggcaaa

SEQ ID NO: 308 - DNA, 1335 bp, Artificial Sequence
  source: /note="Description of Artificial Sequence: Synthetic polynucleotide"
caggtccagctggtccagtcaggggctgaagtggtcaaacccggcgccagcgtgaagctgtcttgcaaggcttccggctacatcttcaccagctactatatgtattgggtgaagcaggctccaggacagggcctggagtggatcggcgagatcaacccttccaatggcgacacaaacttcaatgagaagtttaagagcaaggccaccctgacagtggataagagcgcctctaccgcttacatggagctgtccagcctgaggtctgaggacacagccgtgtactattgtaccaggagcgatggccggaacgacatggattcttggggccagggcacactggtgaccgtgtcttccgccagcacaaagggcccttccgtgttccccctggctccttgctccaggagcacatctgagtccaccgccgctctgggctgtctggtgaaggactacttcccagagcccgtgaccgtgtcctggaatagcggcgccctgacatccggagtgcacacctttccagctgtgctgcagagctctggcctgtacagcctgtccagcgtggtgacagtgccctcttccagcctgggcaccaagacatatacctgcaacgtggaccataagccttctaataccaaggtggataagagagtggagtccaagtacggaccaccttgccctccctgtcctgctccagagttcctgggaggaccttccgtgttcctgtttccacccaagccaaaggacacactgatgatctctcgcacacctgaggtgacctgcgtggtggtggacgtgtcccaggaggaccccgaggtgcagttcaactggtacgtggatggcgtggaggtgcacaatgctaagaccaagccaagggaggagcagtttaactccacataccgggtggtgagcgtgctgaccgtgctgcatcaggattggctgaacggcaaggagtataagtgcaaggtgagcaataagggcctgccctcttccatcgagaagacaatctctaaggctaagggacagccaagggagccacaggtgtacaccctgcctccaagccaggaggagatgacaaagaaccaggtgtctctgacctgtctggtgaagggcttctatccatctgacatcgctgtggagtgggagtccaatggccagcccgagaacaattacaagaccacaccccctgtgctggactctgatggctccttctttctgtattctagactgaccgtggataagtcccgctggcaggagggcaacgtgttctcctgctctgtgatgcacgaagcactgcacaatcattacactcagaagagcctgtcactgtccctgggcaaa

SEQ ID NO: 309 - DNA, 1335 bp, Artificial Sequence
  source: /note="Description of Artificial Sequence: Synthetic polynucleotide"
caggtccagctggtccagtcaggggctgaagtggtcaaacccggcgccagcgtgaagctgtcttgcaaggcttccggctacatcttcaccagctactatatgtattgggtgaagcaggctccaggacagggcctggagtggatcggcgagatcaacccttccaatggcgacacaaacttcaatgagaagtttaagagcaaggccaccctgacagtggataagagcgcctctaccgcttacatggagctgtccagcctgaggtctgaggacacagccgtgtactattgtaccaggagcgatggccggaacgacatggattcttggggccagggcacactggtgaccgtgtcttccgccagcacaaagggcccttccgtgttccccctggctccttgctccaggagcacatctgagtccaccgccgctctgggctgtctggtgaaggactacttcccagagcccgtgaccgtgtcctggaatagcggcgccctgacatccggagtgcacacctttccagctgtgctgcagagctctggcctgtacagcctgtccagcgtggtgacagtgccctcttccagcctgggcaccaagacatatacctgcaacgtggaccataagccttctaataccaaggtggataagagagtggagtccaagtacggaccaccttgccctccctgtcctgctccagagttcgagggaggaccttccgtgttcctgtttccacccaagccaaaggacacactgatgatctctcgcacacctgaggtgacctgcgtggtggtggacgtgtcccaggaggaccccgaggtgcagttcaactggtacgtggatggcgtggaggtgcacaatgctaagaccaagccaagggaggagcagtttaactccacataccgggtggtgagcgtgctgaccgtgctgcatcaggattggctgaacggcaaggagtataagtgcaaggtgagcaataagggcctgccctcttccatcgagaagacaatctctaaggctaagggacagccaagggagccacaggtgtacaccctgcctccaagccaggaggagatgacaaagaaccaggtgtctctgacctgtctggtgaagggcttctatccatctgacatcgctgtggagtgggagtccaatggccagcccgagaacaattacaagaccacaccccctgtgctggactctgatggctccttctttctgtattctagactgaccgtggataagtcccgctggcaggagggcaacgtgttctcctgctctgtgatgcacgaagcactgcacaatcattacactcagaagagcctgtcactgtccctgggcaaa

SEQ ID NO: 310 - DNA, 1335 bp, Artificial Sequence
  source: /note="Description of Artificial Sequence: Synthetic polynucleotide"
caggtccagctggtccagtcaggggctgaagtggtcaaacccggcgccagcgtgaagctgtcttgcaaggcttccggctacatcttcaccagctactatatgtattgggtgaagcaggctccaggacagggcctggagtggatcggcgagatcaacccttccaatggcgacacaaacttcaatgagaagtttaagagcaaggccaccctgacagtggataagagcgcctctaccgcttacatggagctgtccagcctgaggtctgaggacacagccgtgtactattgtaccaggagcgatggccggaacgacatggattcttggggccagggcacactggtgaccgtgtcttccgccagcacaaagggcccttccgtgttccccctggctccttgctccaggagcacatctgagtccaccgccgctctgggctgtctggtgaaggactacttcccagagcccgtgaccgtgtcctggaatagcggcgccctgacatccggagtgcacacctttccagctgtgctgcagagctctggcctgtacagcctgtccagcgtggtgacagtgccctcttccagcctgggcaccaagacatatacctgcaacgtggaccataagccttctaataccaaggtggataagagagtggagtccaagtacggaccaccttgccctccctgtcctgctccagaggccgccggaggaccttccgtgttcctgtttccacccaagccaaaggacacactgatgatctctcgcacacctgaggtgacctgcgtggtggtggacgtgtcccaggaggaccccgaggtgcagttcaactggtacgtggatggcgtggaggtgcacaatgctaagaccaagccaagggaggagcagtttaactccacataccgggtggtgagcgtgctgaccgtgctgcatcaggattggctgaacggcaaggagtataagtgcaaggtgagcaataagggcctgccctcttccatcgagaagacaatctctaaggctaagggacagccaagggagccacaggtgtacaccctgcctccaagccaggaggagatgacaaagaaccaggtgtctctgacctgtctggtgaagggcttctatccatctgacatcgctgtggagtgggagtccaatggccagcccgagaacaattacaagaccacaccccctgtgctggactctgatggctccttctttctgtattctagactgaccgtggataagtcccgctggcaggagggcaacgtgttctcctgctctgtgatgcacgaagcactgcacaatcattacactcagaagagcctgtcactgtccctgggcaaa

SEQ ID NO: 311 - DNA, 1344 bp, Artificial Sequence
  source: /note="Description of Artificial Sequence: Synthetic polynucleotide"
caggtccagctggtccagtcaggtgccgaagtggtcaagcccggcgcctctgtgaagctgtcctgcaaggctagcggctacatcttcacctcctactatatgtattgggtgaagcaggctcctggacagggcctggagtggatcggcgagatcaacccatctaatggcgacaccaacttcaatgagaagtttaagtccaaggccaccctgacagtggataagagcgcctctacagcttacatggagctgtccagcctgaggagcgaggacaccgccgtgtactattgcacaaggtctgatggccggaacgacatggattcctggggccagggcaccctggtgacagtgtcttccgcctctaccaagggcccttccgtgtttccactggctcccagctctaagtccaccagcggaggaacagccgctctgggctgtctggtgaaggactacttcccagagcccgtgacagtgagctggaactctggcgccctgaccagcggagtgcacacatttcctgctgtgctgcagtccagcggcctgtactctctgtcttccgtggtgaccgtgccaagctcttccctgggcacccagacatatatctgcaacgtgaatcacaagccaagcaatacaaaggtggacaagaaggtggagcccaagtcttgtgataagacccatacatgccccccttgtcctgctccagaggctgctggaggaccatccgtgttcctgtttccacccaagcctaaggacaccctgatgatctccagaaccccagaggtgacatgcgtggtggtggacgtgagccacgaggaccccgaggtgaagttcaactggtacgtggatggcgtggaggtgcataatgctaagaccaagccaagagaggagcagtacaacagcacctatcgcgtggtgtctgtgctgacagtgctgcatcaggactggctgaacggcaaggagtataagtgcaaggtgtctaataaggccctgcccgctcctatcgagaagaccatctccaaggccaagggccagcctagggagccacaggtgtacacactgcctccatcccgggacgagctgaccaagaaccaggtgagcctgacatgtctggtgaagggcttctatcccagcgatatcgctgtggagtgggagtctaatggccagcctgagaacaattacaagaccacaccccctgtgctggactccgatggcagcttctttctgtattccaagctgaccgtggataagagccgctggcagcagggcaacgtgttctcctgttccgtcatgcacgaggcactgcacaatcattacacccagaagtcactgtcactgtcaccaggaaar

SEQ ID NO: 312 - DNA, 1344 bp, Artificial Sequence
  source: /note="Description of Artificial Sequence: Synthetic polynucleotide"
caggtccagctggtccagtcaggtgccgaagtggtcaagcccggcgcctctgtgaagctgtcctgcaaggctagcggctacatcttcacctcctactatatgtattgggtgaagcaggctcctggacagggcctggagtggatcggcgagatcaacccatctaatggcgacaccaacttcaatgagaagtttaagtccaaggccaccctgacagtggataagagcgcctctacagcttacatggagctgtccagcctgaggagcgaggacaccgccgtgtactattgcacaaggtctgatggccggaacgacatggattcctggggccagggcaccctggtgacagtgtcttccgcctctaccaagggcccttccgtgtttccactggctcccagctctaagtccaccagcggaggaacagccgctctgggctgtctggtgaaggactacttcccagagcccgtgacagtgagctggaactctggcgccctgaccagcggagtgcacacatttcctgctgtgctgcagtccagcggcctgtactctctgtcttccgtggtgaccgtgccaagctcttccctgggcacccagacatatatctgcaacgtgaatcacaagccaagcaatacaaaggtggacaagaaggtggagcccaagtcttgtgataagacccatacatcccccccttcccctgctccagagctgctgggaggaagctccgtgttcctgtttccacccaagcctaaggacaccctgatgatctccagaaccccagaggtgacatgcgtggtggtggacgtgagccacgaggaccccgaggtgaagttcaactggtacgtggatggcgtggaggtgcataatgctaagaccaagccaagagaggagcagtacaacagcacctatcgcgtggtgtctgtgctgacagtgctgcatcaggactggctgaacggcaaggagtataagtgcaaggtgtctaataaggccctgcccgctcctatcgagaagaccatctccaaggccaagggccagcctagggagccacaggtgtacacactgcctccatcccgggacgagctgaccaagaaccaggtgagcctgacatgtctggtgaagggcttctatcccagcgatatcgctgtggagtgggagtctaatggccagcctgagaacaattacaagaccacaccccctgtgctggactccgatggcagcttctttctgtattccaagctgaccgtggataagagccgctggcagcagggcaacgtgttctcctgttccgtcatgcacgaggcactgcacaatcattacacccagaagtcactgtcactgtcaccaggaaar

SEQ ID NO: 313 - DNA, 1344 bp, Artificial Sequence
  source: /note="Description of Artificial Sequence: Synthetic polynucleotide"
caggtccagctggtccagtcaggtgccgaagtggtcaagcccggcgcctctgtgaagctgtcctgcaaggctagcggctacatcttcacctcctactatatgtattgggtgaagcaggctcctggacagggcctggagtggatcggcgagatcaacccatctaatggcgacaccaacttcaatgagaagtttaagtccaaggccaccctgacagtggataagagcgcctctacagcttacatggagctgtccagcctgaggagcgaggacaccgccgtgtactattgcacaaggtctgatggccggaacgacatggattcctggggccagggcaccctggtgacagtgtcttccgcctctaccaagggcccttccgtgtttccactggctcccagctctaagtccaccagcggaggaacagccgctctgggctgtctggtgaaggactacttcccagagcccgtgacagtgagctggaactctggcgccctgaccagcggagtgcacacatttcctgctgtgctgcagtccagcggcctgtactctctgtcttccgtggtgaccgtgccaagctcttccctgggcacccagacatatatctgcaacgtgaatcacaagccaagcaatacaaaggtggacaagaaggtggagcccaagtcttgtgataagacccatacatgccccccttcccctgctccagagctgctgggaggaagctccgtgttcctgtttccacccaagcctaaggacaccctgatgatctccagaaccccagaggtgacatgcgtggtggtggacgtgagccacgaggaccccgaggtgaagttcaactggtacgtggatggcgtggaggtgcataatgctaagaccaagccaagagaggagcagtacaacagcacctatcgcgtggtgtctgtgctgacagtgctgcatcaggactggctgaacggcaaggagtataagtgcaaggtgtctaataaggccctgcccgctcctatcgagaagaccatctccaaggccaagggccagcctagggagccacaggtgtacacactgcctccatcccgggacgagctgaccaagaaccaggtgagcctgacatgtctggtgaagggcttctatcccagcgatatcgctgtggagtgggagtctaatggccagcctgagaacaattacaagaccacaccccctgtgctggactccgatggcagcttctttctgtattccaagctgaccgtggataagagccgctggcagcagggcaacgtgttctcctgttccgtcatgcacgaggcactgcacaatcattacacccagaagtcactgtcactgtcaccaggaaar

SEQ ID NO: 314 - DNA, 1344 bp, Artificial Sequence
  source: /note="Description of Artificial Sequence: Synthetic polynucleotide"
caggtccagctggtccagtcaggtgccgaagtggtcaagcccggcgcctctgtgaagctgtcctgcaaggctagcggctacatcttcacctcctactatatgtattgggtgaagcaggctcctggacagggcctggagtggatcggcgagatcaacccatctaatggcgacaccaacttcaatgagaagtttaagtccaaggccaccctgacagtggataagagcgcctctacagcttacatggagctgtccagcctgaggagcgaggacaccgccgtgtactattgcacaaggtctgatggccggaacgacatggattcctggggccagggcaccctggtgacagtgtcttccgcctctaccaagggcccttccgtgtttccactggctcccagctctaagtccaccagcggaggaacagccgctctgggctgtctggtgaaggactacttcccagagcccgtgacagtgagctggaactctggcgccctgaccagcggagtgcacacatttcctgctgtgctgcagtccagcggcctgtactctctgtcttccgtggtgaccgtgccaagctcttccctgggcacccagacatatatctgcaacgtgaatcacaagccaagcaatacaaaggtggacaagaaggtggagcccaagtcttgtgataagacccatacatcccccccttgccctgctccagagctgctgggaggaagctccgtgttcctgtttccacccaagcctaaggacaccctgatgatctccagaaccccagaggtgacatgcgtggtggtggacgtgagccacgaggaccccgaggtgaagttcaactggtacgtggatggcgtggaggtgcataatgctaagaccaagccaagagaggagcagtacaacagcacctatcgcgtggtgtctgtgctgacagtgctgcatcaggactggctgaacggcaaggagtataagtgcaaggtgtctaataaggccctgcccgctcctatcgagaagaccatctccaaggccaagggccagcctagggagccacaggtgtacacactgcctccatcccgggacgagctgaccaagaaccaggtgagcctgacatgtctggtgaagggcttctatcccagcgatatcgctgtggagtgggagtctaatggccagcctgagaacaattacaagaccacaccccctgtgctggactccgatggcagcttctttctgtattccaagctgaccgtggataagagccgctggcagcagggcaacgtgttctcctgttccgtcatgcacgaggcactgcacaatcattacacccagaagtcactgtcactgtcaccaggaaar

SEQ ID NO: 315 - DNA, 1335 bp, Artificial Sequence
  source: /note="Description of Artificial Sequence: Synthetic polynucleotide"
caggtccagctggtccagtcaggggctgaagtggtcaaacccggcgccagcgtgaagctgtcttgcaaggcttccggctacatcttcaccagctactatatgtattgggtgaagcaggctccaggacagggcctggagtggatcggcgagatcaacccttccaatggcgacacaaacttcaatgagaagtttaagagcaaggccaccctgacagtggataagagcgcctctaccgcttacatggagctgtccagcctgaggtctgaggacacagccgtgtactattgtaccaggagcgatggccggaacgacatggattcttggggccagggcacaacagtgaccgtgtcttccgccagcacaaagggcccttccgtgttccccctggctccttgctccaggagcacatctgagtccaccgccgctctgggctgtctggtgaaggactacttcccagagcccgtgaccgtgtcctggaatagcggcgccctgacatccggagtgcacacctttccagctgtgctgcagagctctggcctgtacagcctgtccagcgtggtgacagtgccctcttccagcctgggcaccaagacatatacctgcaacgtggaccataagccttctaataccaaggtggataagagagtggagtccaagtacggaccaccttgccctccttgtcctgctccagagttcgccggaggaccttccgtgttcctgtttccacccaagccaaaggacacactgatgatctctcgcacacctgaggtgacctgcgtggtggtggacgtgtcccaggaggaccccgaggtgcagttcaactggtacgtggatggcgtggaggtgcacaatgctaagaccaagccaagggaggagcagtttaactccacataccgggtggtgagcgtgctgaccgtgctgcatcaggattggctgaacggcaaggagtataagtgcaaggtgagcaataagggcctgccctcttccatcgagaagacaatctctaaggctaagggacagccaagggagccacaggtgtacaccctgcctccaagccaggaggagatgacaaagaaccaggtgtctctgacctgtctggtgaagggcttctatccatctgacatcgctgtggagtgggagtccaatggccagcccgagaacaattacaagaccacaccccctgtgctggactctgatggctccttctttctgtattctagactgaccgtggataagtcccgctggcaggagggcaacgtgttctcctgctctgtgatgcacgaagcactgcacaatcattacactcagaagagcctgtcactgtccctgggcaaa

SEQ ID NO: 316 - DNA, 1383 bp, Artificial Sequence
  source: /note="Description of Artificial Sequence: Synthetic polynucleotide"
atgcctctgctgctgctgctgcctctgctgtgggccggtgctctggctcaggtccagctggtccagtcaggggctgaagtggtcaaacccggcgccagcgtgaagctgtcttgcaaggcttccggctacatcttcaccagctactatatgtattgggtgaagcaggctccaggacagggcctggagtggatcggcgagatcaacccttccaatggcgacacaaacttcaatgagaagtttaagagcaaggccaccctgacagtggataagagcgcctctaccgcttacatggagctgtccagcctgaggtctgaggacacagccgtgtactattgtaccaggagcgatggccggaacgacatggattcttggggccagggcacactggtgaccgtgtcttccgccagcacaaagggcccttccgtgttccccctggctccttgctccaggagcacatctgagtccaccgccgctctgggctgtctggtgaaggactacttcccagagcccgtgaccgtgtcctggaatagcggcgccctgacatccggagtgcacacctttccagctgtgctgcagagctctggcctgtacagcctgtccagcgtggtgacagtgccctcttccagcctgggcaccaagacatatacctgcaacgtggaccataagccttctaataccaaggtggataagagagtggagtccaagtacggaccaccttgccctagctgtcctgctccagagttcctgggaggaccttccgtgttcctgtttccacccaagccaaaggacacactgatgatctctcgcacacctgaggtgacctgcgtggtggtggacgtgtcccaggaggaccccgaggtgcagttcaactggtacgtggatggcgtggaggtgcacaatgctaagaccaagccaagggaggagcagtttaactccacataccgggtggtgagcgtgctgaccgtgctgcatcaggattggctgaacggcaaggagtataagtgcaaggtgagcaataagggcctgccctcttccatcgagaagacaatctctaaggctaagggacagccaagggagccacaggtgtacaccctgcctccaagccaggaggagatgacaaagaaccaggtgtctctgacctgtctggtgaagggcttctatccatctgacatcgctgtggagtgggagtccaatggccagcccgagaacaattacaagaccacaccccctgtgctggactctgatggctccttctttctgtattctagactgaccgtggataagtcccgctggcaggagggcaacgtgttctcctgctctgtgatgcacgaagcactgcacaatcattacactcagaagagcctgtcactgtccctgggcaaa

SEQ ID NO: 317 - DNA, 1383 bp, Artificial Sequence
  source: /note="Description of Artificial Sequence: Synthetic polynucleotide"
atgcctctgctgctgctgctgcctctgctgtgggccggtgctctggctcaggtccagctggtccagtcaggggctgaagtggtcaaacccggcgccagcgtgaagctgtcttgcaaggcttccggctacatcttcaccagctactatatgtattgggtgaagcaggctccaggacagggcctggagtggatcggcgagatcaacccttccaatggcgacacaaacttcaatgagaagtttaagagcaaggccaccctgacagtggataagagcgcctctaccgcttacatggagctgtccagcctgaggtctgaggacacagccgtgtactattgtaccaggagcgatggccggaacgacatggattcttggggccagggcacactggtgaccgtgtcttccgccagcacaaagggcccttccgtgttccccctggctccttgctccaggagcacatctgagtccaccgccgctctgggctgtctggtgaaggactacttcccagagcccgtgaccgtgtcctggaatagcggcgccctgacatccggagtgcacacctttccagctgtgctgcagagctctggcctgtacagcctgtccagcgtggtgacagtgccctcttccagcctgggcaccaagacatatacctgcaacgtggaccataagccttctaataccaaggtggataagagagtggagtccaagtacggaccaccttgccctccctgtcctgctccagagttcctgggaggaccttccgtgttcctgtttccacccaagccaaaggacacactgatgatctctcgcacacctgaggtgacctgcgtggtggtggacgtgtcccaggaggaccccgaggtgcagttcaactggtacgtggatggcgtggaggtgcacaatgctaagaccaagccaagggaggagcagtttaactccacataccgggtggtgagcgtgctgaccgtgctgcatcaggattggctgaacggcaaggagtataagtgcaaggtgagcaataagggcctgccctcttccatcgagaagacaatctctaaggctaagggacagccaagggagccacaggtgtacaccctgcctccaagccaggaggagatgacaaagaaccaggtgtctctgacctgtctggtgaagggcttctatccatctgacatcgctgtggagtgggagtccaatggccagcccgagaacaattacaagaccacaccccctgtgctggactctgatggctccttctttctgtattctagactgaccgtggataagtcccgctggcaggagggcaacgtgttctcctgctctgtgatgcacgaagcactgcacaatcattacactcagaagagcctgtcactgtccctgggcaaa

SEQ ID NO: 318 - DNA, 1383 bp, Artificial Sequence
  source: /note="Description of Artificial Sequence: Synthetic polynucleotide"
atgcctctgctgctgctgctgcctctgctgtgggccggtgctctggctcaggtccagctggtccagtcaggggctgaagtggtcaaacccggcgccagcgtgaagctgtcttgcaaggcttccggctacatcttcaccagctactatatgtattgggtgaagcaggctccaggacagggcctggagtggatcggcgagatcaacccttccaatggcgacacaaacttcaatgagaagtttaagagcaaggccaccctgacagtggataagagcgcctctaccgcttacatggagctgtccagcctgaggtctgaggacacagccgtgtactattgtaccaggagcgatggccggaacgacatggattcttggggccagggcacactggtgaccgtgtcttccgccagcacaaagggcccttccgtgttccccctggctccttgctccaggagcacatctgagtccaccgccgctctgggctgtctggtgaaggactacttcccagagcccgtgaccgtgtcctggaatagcggcgccctgacatccggagtgcacacctttccagctgtgctgcagagctctggcctgtacagcctgtccagcgtggtgacagtgccctcttccagcctgggcaccaagacatatacctgcaacgtggaccataagccttctaataccaaggtggataagagagtggagtccaagtacggaccaccttgccctccctgtcctgctccagagttcgagggaggaccttccgtgttcctgtttccacccaagccaaaggacacactgatgatctctcgcacacctgaggtgacctgcgtggtggtggacgtgtcccaggaggaccccgaggtgcagttcaactggtacgtggatggcgtggaggtgcacaatgctaagaccaagccaagggaggagcagtttaactccacataccgggtggtgagcgtgctgaccgtgctgcatcaggattggctgaacggcaaggagtataagtgcaaggtgagcaataagggcctgccctcttccatcgagaagacaatctctaaggctaagggacagccaagggagccacaggtgtacaccctgcctccaagccaggaggagatgacaaagaaccaggtgtctctgacctgtctggtgaagggcttctatccatctgacatcgctgtggagtgggagtccaatggccagcccgagaacaattacaagaccacaccccctgtgctggactctgatggctccttctttctgtattctagactgaccgtggataagtcccgctggcaggagggcaacgtgttctcctgctctgtgatgcacgaagcactgcacaatcattacactcagaagagcctgtcactgtccctgggcaaa

SEQ ID NO: 319 - DNA, 1383 bp, Artificial Sequence
  source: /note="Description of Artificial Sequence: Synthetic polynucleotide"
atgcctctgctgctgctgctgcctctgctgtgggccggtgctctggctcaggtccagctggtccagtcaggggctgaagtggtcaaacccggcgccagcgtgaagctgtcttgcaaggcttccggctacatcttcaccagctactatatgtattgggtgaagcaggctccaggacagggcctggagtggatcggcgagatcaacccttccaatggcgacacaaacttcaatgagaagtttaagagcaaggccaccctgacagtggataagagcgcctctaccgcttacatggagctgtccagcctgaggtctgaggacacagccgtgtactattgtaccaggagcgatggccggaacgacatggattcttggggccagggcacactggtgaccgtgtcttccgccagcacaaagggcccttccgtgttccccctggctccttgctccaggagcacatctgagtccaccgccgctctgggctgtctggtgaaggactacttcccagagcccgtgaccgtgtcctggaatagcggcgccctgacatccggagtgcacacctttccagctgtgctgcagagctctggcctgtacagcctgtccagcgtggtgacagtgccctcttccagcctgggcaccaagacatatacctgcaacgtggaccataagccttctaataccaaggtggataagagagtggagtccaagtacggaccaccttgccctccctgtcctgctccagaggccgccggaggaccttccgtgttcctgtttccacccaagccaaaggacacactgatgatctctcgcacacctgaggtgacctgcgtggtggtggacgtgtcccaggaggaccccgaggtgcagttcaactggtacgtggatggcgtggaggtgcacaatgctaagaccaagccaagggaggagcagtttaactccacataccgggtggtgagcgtgctgaccgtgctgcatcaggattggctgaacggcaaggagtataagtgcaaggtgagcaataagggcctgccctcttccatcgagaagacaatctctaaggctaagggacagccaagggagccacaggtgtacaccctgcctccaagccaggaggagatgacaaagaaccaggtgtctctgacctgtctggtgaagggcttctatccatctgacatcgctgtggagtgggagtccaatggccagcccgagaacaattacaagaccacaccccctgtgctggactctgatggctccttctttctgtattctagactgaccgtggataagtcccgctggcaggagggcaacgtgttctcctgctctgtgatgcacgaagcactgcacaatcattacactcagaagagcctgtcactgtccctgggcaaa

SEQ ID NO: 320 - DNA, 1392 bp, Artificial Sequence
  source: /note="Description of Artificial Sequence: Synthetic polynucleotide"
atgcctctgctgctgctgctgcctctgctgtgggccggtgccctggctcaggtccagctggtccagtcaggtgccgaagtggtcaagcccggcgcctctgtgaagctgtcctgcaaggctagcggctacatcttcacctcctactatatgtattgggtgaagcaggctcctggacagggcctggagtggatcggcgagatcaacccatctaatggcgacaccaacttcaatgagaagtttaagtccaaggccaccctgacagtggataagagcgcctctacagcttacatggagctgtccagcctgaggagcgaggacaccgccgtgtactattgcacaaggtctgatggccggaacgacatggattcctggggccagggcaccctggtgacagtgtcttccgcctctaccaagggcccttccgtgtttccactggctcccagctctaagtccaccagcggaggaacagccgctctgggctgtctggtgaaggactacttcccagagcccgtgacagtgagctggaactctggcgccctgaccagcggagtgcacacatttcctgctgtgctgcagtccagcggcctgtactctctgtcttccgtggtgaccgtgccaagctcttccctgggcacccagacatatatctgcaacgtgaatcacaagccaagcaatacaaaggtggacaagaaggtggagcccaagtcttgtgataagacccatacatgccccccttgtcctgctccagaggctgctggaggaccatccgtgttcctgtttccacccaagcctaaggacaccctgatgatctccagaaccccagaggtgacatgcgtggtggtggacgtgagccacgaggaccccgaggtgaagttcaactggtacgtggatggcgtggaggtgcataatgctaagaccaagccaagagaggagcagtacaacagcacctatcgcgtggtgtctgtgctgacagtgctgcatcaggactggctgaacggcaaggagtataagtgcaaggtgtctaataaggccctgcccgctcctatcgagaagaccatctccaaggccaagggccagcctagggagccacaggtgtacacactgcctccatcccgggacgagctgaccaagaaccaggtgagcctgacatgtctggtgaagggcttctatcccagcgatatcgctgtggagtgggagtctaatggccagcctgagaacaattacaagaccacaccccctgtgctggactccgatggcagcttctttctgtattccaagctgaccgtggataagagccgctggcagcagggcaacgtgttctcctgttccgtcatgcacgaggcactgcacaatcattacacccagaagtcactgtcactgtcaccaggaaar

SEQ ID NO: 321 - DNA, 1392 bp, Artificial Sequence
  source: /note="Description of Artificial Sequence: Synthetic polynucleotide"
atgcctctgctgctgctgctgcctctgctgtgggccggtgccctggctcaggtccagctggtccagtcaggtgccgaagtggtcaagcccggcgcctctgtgaagctgtcctgcaaggctagcggctacatcttcacctcctactatatgtattgggtgaagcaggctcctggacagggcctggagtggatcggcgagatcaacccatctaatggcgacaccaacttcaatgagaagtttaagtccaaggccaccctgacagtggataagagcgcctctacagcttacatggagctgtccagcctgaggagcgaggacaccgccgtgtactattgcacaaggtctgatggccggaacgacatggattcctggggccagggcaccctggtgacagtgtcttccgcctctaccaagggcccttccgtgtttccactggctcccagctctaagtccaccagcggaggaacagccgctctgggctgtctggtgaaggactacttcccagagcccgtgacagtgagctggaactctggcgccctgaccagcggagtgcacacatttcctgctgtgctgcagtccagcggcctgtactctctgtcttccgtggtgaccgtgccaagctcttccctgggcacccagacatatatctgcaacgtgaatcacaagccaagcaatacaaaggtggacaagaaggtggagcccaagtcttgtgataagacccatacatcccccccttcccctgctccagagctgctgggaggaagctccgtgttcctgtttccacccaagcctaaggacaccctgatgatctccagaaccccagaggtgacatgcgtggtggtggacgtgagccacgaggaccccgaggtgaagttcaactggtacgtggatggcgtggaggtgcataatgctaagaccaagccaagagaggagcagtacaacagcacctatcgcgtggtgtctgtgctgacagtgctgcatcaggactggctgaacggcaaggagtataagtgcaaggtgtctaataaggccctgcccgctcctatcgagaagaccatctccaaggccaagggccagcctagggagccacaggtgtacacactgcctccatcccgggacgagctgaccaagaaccaggtgagcctgacatgtctggtgaagggcttctatcccagcgatatcgctgtggagtgggagtctaatggccagcctgagaacaattacaagaccacaccccctgtgctggactccgatggcagcttctttctgtattccaagctgaccgtggataagagccgctggcagcagggcaacgtgttctcctgttccgtcatgcacgaggcactgcacaatcattacacccagaagtcactgtcactgtcaccaggaaar

SEQ ID NO: 322 - DNA, 1392 bp, Artificial Sequence
  source: /note="Description of Artificial Sequence: Synthetic polynucleotide"
atgcctctgctgctgctgctgcctctgctgtgggccggtgccctggctcaggtccagctggtccagtcaggtgccgaagtggtcaagcccggcgcctctgtgaagctgtcctgcaaggctagcggctacatcttcacctcctactatatgtattgggtgaagcaggctcctggacagggcctggagtggatcggcgagatcaacccatctaatggcgacaccaacttcaatgagaagtttaagtccaaggccaccctgacagtggataagagcgcctctacagcttacatggagctgtccagcctgaggagcgaggacaccgccgtgtactattgcacaaggtctgatggccggaacgacatggattcctggggccagggcaccctggtgacagtgtcttccgcctctaccaagggcccttccgtgtttccactggctcccagctctaagtccaccagcggaggaacagccgctctgggctgtctggtgaaggactacttcccagagcccgtgacagtgagctggaactctggcgccctgaccagcggagtgcacacatttcctgctgtgctgcagtccagcggcctgtactctctgtcttccgtggtgaccgtgccaagctcttccctgggcacccagacatatatctgcaacgtgaatcacaagccaagcaatacaaaggtggacaagaaggtggagcccaagtcttgtgataagacccatacatgccccccttcccctgctccagagctgctgggaggaagctccgtgttcctgtttccacccaagcctaaggacaccctgatgatctccagaaccccagaggtgacatgcgtggtggtggacgtgagccacgaggaccccgaggtgaagttcaactggtacgtggatggcgtggaggtgcataatgctaagaccaagccaagagaggagcagtacaacagcacctatcgcgtggtgtctgtgctgacagtgctgcatcaggactggctgaacggcaaggagtataagtgcaaggtgtctaataaggccctgcccgctcctatcgagaagaccatctccaaggccaagggccagcctagggagccacaggtgtacacactgcctccatcccgggacgagctgaccaagaaccaggtgagcctgacatgtctggtgaagggcttctatcccagcgatatcgctgtggagtgggagtctaatggccagcctgagaacaattacaagaccacaccccctgtgctggactccgatggcagcttctttctgtattccaagctgaccgtggataagagccgctggcagcagggcaacgtgttctcctgttccgtcatgcacgaggcactgcacaatcattacacccagaagtcactgtcactgtcaccaggaaar

SEQ ID NO: 323 - DNA, 1392 bp, Artificial Sequence
  source: /note="Description of Artificial Sequence: Synthetic polynucleotide"
atgcctctgctgctgctgctgcctctgctgtgggccggtgccctggctcaggtccagctggtccagtcaggtgccgaagtggtcaagcccggcgcctctgtgaagctgtcctgcaaggctagcggctacatcttcacctcctactatatgtattgggtgaagcaggctcctggacagggcctggagtggatcggcgagatcaacccatctaatggcgacaccaacttcaatgagaagtttaagtccaaggccaccctgacagtggataagagcgcctctacagcttacatggagctgtccagcctgaggagcgaggacaccgccgtgtactattgcacaaggtctgatggccggaacgacatggattcctggggccagggcaccctggtgacagtgtcttccgcctctaccaagggcccttccgtgtttccactggctcccagctctaagtccaccagcggaggaacagccgctctgggctgtctggtgaaggactacttcccagagcccgtgacagtgagctggaactctggcgccctgaccagcggagtgcacacatttcctgctgtgctgcagtccagcggcctgtactctctgtcttccgtggtgaccgtgccaagctcttccctgggcacccagacatatatctgcaacgtgaatcacaagccaagcaatacaaaggtggacaagaaggtggagcccaagtcttgtgataagacccatacatcccccccttgccctgctccagagctgctgggaggaagctccgtgttcctgtttccacccaagcctaaggacaccctgatgatctccagaaccccagaggtgacatgcgtggtggtggacgtgagccacgaggaccccgaggtgaagttcaactggtacgtggatggcgtggaggtgcataatgctaagaccaagccaagagaggagcagtacaacagcacctatcgcgtggtgtctgtgctgacagtgctgcatcaggactggctgaacggcaaggagtataagtgcaaggtgtctaataaggccctgcccgctcctatcgagaagaccatctccaaggccaagggccagcctagggagccacaggtgtacacactgcctccatcccgggacgagctgaccaagaaccaggtgagcctgacatgtctggtgaagggcttctatcccagcgatatcgctgtggagtgggagtctaatggccagcctgagaacaattacaagaccacaccccctgtgctggactccgatggcagcttctttctgtattccaagctgaccgtggataagagccgctggcagcagggcaacgtgttctcctgttccgtcatgcacgaggcactgcacaatcattacacccagaagtcactgtcactgtcaccaggaaar

SEQ ID NO: 324 - DNA, 1383 bp, Artificial Sequence
  source: /note="Description of Artificial Sequence: Synthetic polynucleotide"
atgcctctgctgctgctgctgcctctgctgtgggccggtgctctggctcaggtccagctggtccagtcaggggctgaagtggtcaaacccggcgccagcgtgaagctgtcttgcaaggcttccggctacatcttcaccagctactatatgtattgggtgaagcaggctccaggacagggcctggagtggatcggcgagatcaacccttccaatggcgacacaaacttcaatgagaagtttaagagcaaggccaccctgacagtggataagagcgcctctaccgcttacatggagctgtccagcctgaggtctgaggacacagccgtgtactattgtaccaggagcgatggccggaacgacatggattcttggggccagggcacaacagtgaccgtgtcttccgccagcacaaagggcccttccgtgttccccctggctccttgctccaggagcacatctgagtccaccgccgctctgggctgtctggtgaaggactacttcccagagcccgtgaccgtgtcctggaatagcggcgccctgacatccggagtgcacacctttccagctgtgctgcagagctctggcctgtacagcctgtccagcgtggtgacagtgccctcttccagcctgggcaccaagacatatacctgcaacgtggaccataagccttctaataccaaggtggataagagagtggagtccaagtacggaccaccttgccctccttgtcctgctccagagttcgccggaggaccttccgtgttcctgtttccacccaagccaaaggacacactgatgatctctcgcacacctgaggtgacctgcgtggtggtggacgtgtcccaggaggaccccgaggtgcagttcaactggtacgtggatggcgtggaggtgcacaatgctaagaccaagccaagggaggagcagtttaactccacataccgggtggtgagcgtgctgaccgtgctgcatcaggattggctgaacggcaaggagtataagtgcaaggtgagcaataagggcctgccctcttccatcgagaagacaatctctaaggctaagggacagccaagggagccacaggtgtacaccctgcctccaagccaggaggagatgacaaagaaccaggtgtctctgacctgtctggtgaagggcttctatccatctgacatcgctgtggagtgggagtccaatggccagcccgagaacaattacaagaccacaccccctgtgctggactctgatggctccttctttctgtattctagactgaccgtggataagtcccgctggcaggagggcaacgtgttctcctgctctgtgatgcacgaagcactgcacaatcattacactcagaagagcctgtcactgtccctgggcaaa

SEQ ID NO: 325 - protein, 7 aa, Artificial Sequence
  source: /note="Description of Artificial Sequence: Synthetic peptide"
EPKSSDK

SEQ ID NO: 326 - protein, 10 aa, Artificial Sequence
  source: /note="Description of Artificial Sequence: Synthetic peptide"
ASTEPKSSDK

SEQ ID NO: 327 - protein, 25 aa, Artificial Sequence
  source: /note="Description of Artificial Sequence: Synthetic peptide"
  MISC_FEATURE (1)..(25): This sequence may encompass 1-5 "Gly Gly Gly Gly Ser" repeating units
GGGGSGGGGSGGGGSGGGGSGGGGS

SEQ ID NO: 328 - protein, 25 aa, Artificial Sequence
  source: /note="Description of Artificial Sequence: Synthetic peptide"
  MISC_FEATURE (1)..(25): This sequence may encompass 1-5 "Ser Ser Ser Ser Gly" repeating units
SSSSGSSSSGSSSSGSSSSGSSSSG

SEQ ID NO: 329 - protein, 25 aa, Artificial Sequence
  source: /note="Description of Artificial Sequence: Synthetic peptide"
  MISC_FEATURE (1)..(25): This sequence may encompass 1-5 "Gly Ser Ser Gly Gly" repeating units
GSSGGGSSGGGSSGGGSSGGGSSGG

SEQ ID NO: 330 - protein, 25 aa, Artificial Sequence
  source: /note="Description of Artificial Sequence: Synthetic peptide"
  MISC_FEATURE (1)..(25): This sequence may encompass 1-5 "Gly Gly Ser Gly Gly" repeating units
GGSGGGGSGGGGSGGGGSGGGGSGG

SEQ ID NO: 331 - protein, 6 aa, Artificial Sequence
  source: /note="Description of Artificial Sequence: Synthetic 6xHis tag"
HHHHHH

We claim:

1. An isolated antibody that binds to CD154, comprising a human or humanized variable domain, wherein the variable domain comprises a heavy chain variable region (VH) and a light chain variable region (VL), and wherein the VH is operably linked to a human Fc domain with modified effector functions.

2. The antibody of claim 1, wherein one or more effector functions are reduced.

3. The antibody of claim 1 or 2, wherein one or more effector functions are eliminated.

4. The antibody of any one of claims 1-3, wherein the VH is operably linked to a human Fc region, wherein the human Fc region comprises a human hinge sequence and the human Fc domain, wherein the human hinge sequence is between the VH and the human Fc domain.

5. The antibody of claim 4, wherein the hinge comprises the amino acid sequence of any one of SEQ ID NOs: 76-90.

6. The antibody of any one of claims 1-5, wherein the Fc domain is derived from an IgG4 Fc (or crystallizable fragment) region.

7. The antibody of claim 6, wherein the Fc domain comprises one or more amino acid modifications that modifies effector functions.

8. The antibody of claim 7, wherein the antibody comprises an amino acid modification at any one of the positions selected from the group consisting of S228, L235, G237, E318, and N297 or a combination thereof, wherein the numbering of amino acid residues is according to the EU index as set forth in Edelman.

9. The antibody of claim 8, wherein the antibody comprises an amino acid modification selected from the group consisting of S228P, F234A, L235A, L235E, G237A, E318A, and N297Q or a combination thereof.

10. The antibody of any one of claims 1-5, wherein the Fc domain is derived from an IgG1 Fc (or crystallizable fragment) region and comprises one or more amino acid modifications that modifies effector functions.

11. The antibody of claim 10, wherein the antibody comprises an amino acid modification at any one of the positions selected from the group consisting of E216, R217, K218, C219, C220, C226, C229, P230, E233, L234, L235, G236, G237, P238, S239, V240, F241, K246, L251, T260, D265, V266, H268, W277, N297, E318, K322, P329, A330, P331, Q347, N348, T350, L351, K360, T366, N390, K392, T394, D399, 5400, F405, Y407, K409, T411, or a combination thereof, wherein the numbering of amino acid residues is according to the EU index as set forth in Edelman.

12. The antibody of claim 11, wherein the antibody comprises an amino acid modification selected from the group consisting of C220S, C226S, C229S, P230S, E233P, L234A, L234F, L234V, L235A, L235E, L235V, G236E, G237A, P238S, D265S, D265A, H268Q, W277T, N297G, N297Q, N297D, N297A, E318A, K322A, P329G, P329A, A330S, P331S, Q347R, Q347E, Q347K, T350V, L351Y, K360D, K360E, T366A, T366I, T366L, T366M, T366V, N390R, N390K, N390D, K392V, K392M, K392R, K392L, K392F, K392E, T394W, D399R, D399W, D399K, S400E, S400D, S400R, S400K, F405A, F405I, F405M, F405T, F405S, F405V, F405W, Y407A, Y407I, Y407L, Y407V, K409F, K409I, K409S, K409W, T411N, T411R, T411Q, T411K, T411D, T411E, T411W, ΔE216-E222, K246R/L251E/T260R, InR234/235, InV235/236, InR236/237, InR237/238, InV238/239, InN238/239, InL238/239, InE238/239, InG238/239, InS239/240, InG240/241, InE240/241, InG240/241, InL238/239/P238Q, InE238/239/N348A, InS239/240/V266A, and InR237/238/G236A or a combination thereof.

13. The antibody of any one of claims 1-5, wherein the Fc domain is derived from an IgG2 Fc (or crystallizable fragment) crystallizable fragment region.

14. The antibody of claim 13, wherein the antibody comprises an amino acid modification at any one of the positions selected from the group consisting of V234, G237, P238, H268, V309, A330, and P331 or a combination thereof, wherein the numbering of amino acid residues is according to the EU index as set forth in Edelman.

15. The antibody of claim 14, wherein the antibody comprises an amino acid modification selected from the group consisting of V234A, G237A, P238S, H268Q, H268A, V309L, A330S, and P331S, or a combination thereof.

16. The antibody of any one of claims 1-5, wherein the Fc domain comprises the amino acid sequence selected from the group consisting of SEQ ID NOs: 3-9, 12-18, and 238-241.

17. The antibody according to claim 4, wherein the Fc region comprises the amino acid sequence selected from the group consisting of SEQ ID NOs: 21-37, 40-56, and 243-251.

18. The antibody of any one of claims 1-17, wherein the VH comprises
(a) a heavy chain CDR1 having the amino acid sequence of SEQ ID NO: 57,
(b) a heavy chain CDR2 having the amino acid sequence of SEQ ID NO: 58, and
(c) a heavy chain CDR3 having the amino acid sequence of SEQ ID NO: 59; and wherein the VL comprises
(a) a light chain CDR1 having the amino acid sequence of SEQ ID NO: 60,
(b) a light chain CDR2 having the amino acid sequence of SEQ ID NO: 61, and
(c) a light chain CDR3 having the amino acid sequence of SEQ ID NO: 62.

19. The antibody of any one of claims 1-18, wherein the VH comprises the amino acid sequence selected from the group consisting of SEQ ID NO: 63, 64, 252 and 253.

20. The antibody of any one of claims 1-19, wherein the VL comprises the amino acid sequence of SEQ ID NO: 65 or 66.

21. The antibody of any one of claims 4-20, wherein the antibody further comprises a CH1 domain, wherein the CH1 domain is operably linked to
(a) the C-terminal end of the VH, and
(b) the N-terminal end of the hinge.

22. The antibody of claim 21, wherein the CH1 domain comprises an amino acid sequence that is at least 80% identical to the amino acid sequence of any one of SEQ ID NOs: 67, 70, and 73.

23. The antibody of any one of claims 1-22, wherein the antibody comprises a linker between the VH and the Fc domain.

24. The antibody of any one of claims 4-22, wherein the antibody comprises a linker between the VH and the hinge.

25. The antibody of claim 21 or 22, wherein the antibody comprises a linker between the VH and the CH1 domain.

26. The antibody of any one of claims 23-25, wherein the linker comprises the amino acid sequence of any one of SEQ ID NOs: 199-223 and 327-330.

27. The antibody of any one of claims 1-26, wherein the VH is operably linked to the amino acid sequence of any one of SEQ ID NOs: 3-9, 12-18, 21-37, 40-56, 238-241, and 243-251.

28. The antibody of any one of claims 1-27, wherein the heavy chain comprises the amino acid sequence of any one of SEQ ID NOs: 121-132, 135-146, 149, 151-160, 163, 165-174, 266-277, and 279-288.

29. The antibody of any one of claims 1-28, wherein the light chain comprises the amino acid sequence of SEQ ID NO: 195 or 196.

30. The antibody of any one of claims 1-29, wherein the antibody is monoclonal.

31. The antibody of any one of claims 1-30, wherein the antibody is chimeric.

32. The antibody of any one of claims 1-31, wherein the antibody is humanized.

33. The antibody of any one of claims 1-17, 21-27 and 30, wherein the antibody is human.

34. The antibody of any one of claims 1-33, wherein the binding of the antibody to human CD154 inhibits the interaction between human CD154 and human CD40.

35. The antibody of any one of claims 1-34, wherein the antibody blocks the activation of one or more of B cells, macrophages, dendritic cells, or endothelial cells by inhibiting binding of CD154 to CD40.

36. The antibody of any one of claims 1-35, wherein the antibody has one or more of the following effects when administered to a subject:
(a) decreased risk of thrombosis or thromboembolic events compared to hu5c8 antibody;
(b) decreased activation of platelets expressing CD154;
(c) inhibition of CD154 shedding; and
(d) alteration of the expression or activity of downstream targets of CD154-CD40 signaling.

37. The antibody of any one of claims 1-36, wherein the antibody has a K_{D} of less than 50 pM for CD154, such as 5-25 pM or 9.5-23 pM.

38. The antibody of any one of claims 1-37, wherein the antibody does not comprise the amino acid sequence consisting of any one of SEQ ID NOs: 119, 120, 133, 134, 147, 148, 150, 161, 162, 164, 230, 234 and 278.

39. An isolated nucleic acid molecule encoding a light chain and a heavy chain of an anti-CD154 antibody of any one of claims 1-38.

40. An isolated nucleic acid molecule encoding an anti-CD154 antibody comprising the amino acid sequence of any one of SEQ ID NOs: 121-132, 135-146, 149, 151-160, 163, 165-174, 195, 196, 266-277, and 279-288.

41. A first isolated nucleic acid molecule and a second isolated nucleic acid molecule, wherein the first isolated nucleic acid molecule encodes a heavy chain comprising the amino acid sequence of any one of SEQ ID NOs: 121-132, 135-146, 149, 151-160, 163, 165-174, 266-277, and 279-288 and the second isolated nucleic acid molecule encodes a light chain comprising the amino acid sequence of SEQ ID NO: 195 or 196.

42. A first isolated nucleic acid molecule and a second isolated nucleic acid molecule, wherein the first isolated and second nucleic acid molecules encode, respectively a heavy chain and a light chain of an anti-CD154 antibody of any one of claims 1-38.

43. A vector comprising the isolated nucleic acid molecule according to claim 39 or 40.

44. A first vector and a second vector, wherein the first vector comprises the first isolated nucleic acid molecule according to claim 41 or 42, and the second vector comprises the second isolated nucleic acid molecule according to claim 41 or 42.

45. A transformed cell comprising the isolated nucleic acid molecule according to claim 39 or 40, the first and second isolated nucleic acid molecules according to claim 41 or 42, the vector according to claim 43, or the first and second vectors according to claim 44.

46. A pharmaceutical composition comprising an anti-CD154 antibody of any one of claims 1-38 and a pharmaceutically acceptable carrier.

47. A pharmaceutical composition comprising the isolated nucleic acid molecule according to claim 39 or 40, the first and second isolated nucleic acid molecules according to claim 41 or 42, the vector according to claim 43, or the first and second vectors according to claim 44, and a pharmaceutically acceptable excipient.

48. A pharmaceutical composition comprising the transformed cell according to claim 45 and a pharmaceutically acceptable excipient.

49. A method of inhibiting an immune response in a subject comprising administering to the subject a therapeutically effective amount of an antibody of any one of claims 1-38 or the pharmaceutical composition of claim any one of claims 46-48.

50. The method of claim 49, wherein the immune response is a humoral response.

51. The method of claim 50, wherein the immune response is an antibody-mediated response.

52. The method of claim 49, wherein the immune response is a cell-mediated response.

53. The method of claim 52, wherein the cell-mediated response is one or more of a cytotoxic T-cell mediated immune response, a macrophage mediated response, a natural killer (NK) cell mediated immune response or a cytokine mediated response.

54. The method of claim 49, wherein the immune response is a mixed humoral and cell-mediated response.

55. The method of claim 54, wherein the mixed response is one or more of an antibody-mediated response, a cytotoxic T-cell mediated immune response, a macrophage mediated response, a natural killer (NK) cell mediated immune response or a cytokine mediated response.

56. The method of any one of claims 49-55, wherein the subject is human.

57. The method of any one of claims 49-55, wherein the subject is non-human.

58. The method of claim 57, wherein the subject is a monkey.

59. The method of any one of claims 49-58, wherein the subject has received or will receive a cell, tissue or organ transplant.

60. The method of claim 59, wherein the transplant is an allogeneic transplant, autologous transplant or a xenogeneic transplant.

61. The method of claim 59 or 60, wherein the cell is an engineered cell or an ex-vivo expanded cell.

62. The method of claim 61, wherein one or more genes in the cell is modified using one or more techniques selected from a group consisting of transduction to express a cDNA, a CRISPR/Cas9 system, RNAi technology and retroviral technology.

63. The method of claim 61 or 62, wherein the cell is modified to express a chimeric antigen receptor (CAR) on its surface.

64. The method of any one of claims 59-63, wherein the cell is selected from a group consisting of a stem cell, a regulatory T cell, a CAR-T cell, a CAR-B cell, a tumor-infiltrating lymphocyte (TIL).

65. The method of any one of claims 59-64, wherein the method comprises treating or preventing a transplant rejection in the subject.

66. The method of claim 65, wherein the transplant rejection is an acute or a chronic humoral rejection of a grafted cell, tissue, or organ.

67. The method of claim 65 or 66, wherein the transplant rejection is an acute or chronic graft rejection in a graft recipient of an allogeneic transplant or xenotransplant.

68. The method of claim 66 or 67, wherein the method promotes a long-term graft survival of the grafted cell, tissue or organ, wherein said long-term graft survival is selected from the group consisting of:
(a) at least 6 months post-transplant;
(b) at least 1 year post-transplant; and
(c) at least 5 years post-transplant.

69. The method of any one of claims 65-68, wherein the transplant rejection is associated with a hematopoietic cell or bone marrow transplant, an allogeneic transplant of pancreatic islet cells, graft vs host disease, or a solid organ transplant selected from the group consisting of a heart transplant, a kidney transplant, a liver transplant, a lung transplant, a pancreas transplant, a kidney-pancreas transplant, a heart-lung transplant, kidney-heart transplant, a kidney-heart-pancreas transplant, a heart-liver transplant, a heart-liver-kidney transplant, a heart-lung-kidney transplant, a heart-lung-liver transplant, a lung-kidney transplant, a lung-liver transplant, a liver-intestines-pancreas transplant, an intestines-pancreas transplant, a liver-kidney-intestines-pancreas transplant, and a kidney-intestines transplant.

70. The method of any one of claims 56-58, wherein the subject has an immune-related disease, atherosclerotic disorder, or neurodegenerative disorder.

71. The method of any one of claims 56-58 and 70, wherein the subject had or is at risk of having a stroke, a transient ischemic attack (TIA), an aneurysm, or a dissecting aneurysm.

72. The method of claim 70, wherein the immune-related disease is selected from a group consisting of type I diabetes, juvenile diabetes, autoimmune diabetes, autoimmune hemolytic anemia, rheumatoid arthritis, systemic lupus erythematosus (SLE), psoriasis, multiple sclerosis, inflammatory bowel disease, Addison's disease, Crohn's disease, Graves' disease, Sjögren's syndrome, Hashimoto's thyroiditis, myasthenia gravis, vasculitis, pernicious anemia, celiac diseases, Guillain-Barre syndrome, ankylosing spondylitis, primary biliary cirrhosis, lupus nephritis, Goodpasture's disease, polymyositis, dermatomyositis, psoriasis, temporal arteritis, Churg-Strauss syndrome, transverse myelitis, thyroiditis, ulcerative colitis, sarcoidosis, hemolytic anemia, idiopathic thrombocytopenic purpura, neuromyelitis optica spectrum disorder, paroxysmal nocturnal hemoglobinuria, atypical hemolytic uremic syndrome, Behcet's disease, diabetic retinopathy (DR), diabetic macular edema (DME), wet age-related macular degeneration (AMD), and macular edema following retinal vein occlusion (MEfRVO).

73. The method of claim 70, wherein the immune-related disease is selected from a group consisting of severe acute respiratory syndrome (SARS), Middle East respiratory syndrome (MERS), coronavirus disease 2019 (COVID-19), cytokine release syndrome (CRS), and cytokine storm syndrome.

74. The method of claim 70, wherein the immune-related disease is selected from a group consisting of acute respiratory distress syndrome (ARDS), pneumonia, bronchitis, pneumonitis, and chronic obstructive pulmonary disease (COPD).

75. The method of claim 70, wherein the neurodegenerative disorder is selected from a group consisting of Alzheimer's disease, traumatic brain injury (TBI), chronic traumatic encephalitis (CTE), amyotrophic lateral sclerosis (ALS) and Parkinson's disease.

76. The method of claim 70, wherein the atherosclerotic disorder is selected from a group consisting of angina pectoris, myocardial infarction, carotid stenosis, transient ischemic attacks and cerebral vascular accident (CVA).

77. The method according to claim 70, wherein the immune-related disease is an allergic condition.

78. The method according to claim 77, wherein the allergic condition is selected from the group consisting of allergic rhinitis, asthma, atopic eczema, anaphylaxis, insect venom allergy, drug allergy, and food allergy.

79. The method of claim 49, wherein the immune response is a primary response or a secondary response.

80. The method of any one of claims 49-79, wherein the antibody is administered systemically.

81. The method of claim 80, wherein the anti-CD154 antibody is administered subcutaneously, intravenously, intravitreally, orally, via inhalation, transdermally, or rectally.

82. The method of any one of claims 49-79, wherein the antibody is administered locally.

83. The method of any one of claims 49-82, wherein the anti-CD154 antibody is administered in combination with one or more additional agents selected from the group consisting of anti-thrombotic drugs, anti-platelet drugs, non-steroidal anti-inflammatory drugs (NSAIDs) and anti-allergy drugs.

84. The method of claim 83, wherein the anti-CD154 antibody is administered prior to, subsequently to, or simultaneously with the one or more additional agents.

85. The method of claim 83 or 84, wherein the anti-thrombotic drug is selected from a group consisting of a glycoprotein IIb/IIIa receptor antagonist, a direct or indirect factor Xa inhibitor and an anticoagulant.

86. The method of claim 85, wherein the anticoagulant is selected from a group consisting of heparin, warfarin, rivaroxaban, ximelgatran, dabigatran, apixaban, edoxaban, enoxaparin, and fondaparinux.

87. The method of claim 85, wherein the glycoprotein IIb/IIIa receptor antagonist is selected from a group consisting abciximab, rivaroxaban, apixaban, edoxaban, idrabiotaparinux, tirofiban, and eptifibatide.

88. The method of claim 85, wherein the direct or indirect factor Xa inhibitor is selected from a group consisting of apixaban, idrabiotaparinux, fondaparinux, and rivaroxaban.

89. The method of claim 83 or 84, wherein the anti-platelet drug is selected from the group consisting of drugs inhibiting the TXA2 pathway, adenosine diphosphate (ADP) pathway inhibitors, thrombin inhibitors, Protease activated receptor-1 (PAR-1) inhibitors and phosphodiesterase (PDE) inhibitors.

90. The method of claim 89, wherein the ADP pathway inhibitor is selected from a group consisting of clopidogrel, ticlopidine, prasugrel, ticagrelor, cangrelor and elinogrel.

91. The method of claim 89, wherein the PDE inhibitor is selected from a group consisting of dipyridamole and cilostazol.

92. The method of claim 83 or 84, wherein the NSAID is selected from the group consisting of acetylsalicylic acid (aspirin), celecoxib, diclofenac, diflunisal, etodolac, ibuprofen, indomethacin, ketoprofen, ketorolac, nabumetone, naproxen, oxaprozin, piroxicam, salsalate, sulindac, tolmetin and prasugrel.

93. The method of any one of claims 49-92, wherein the anti-CD154 antibody is administered in combination with one or more supplemental agents selected from the group consisting of immunosuppressive drugs, immunomodulatory drugs, anti-CD2 antibodies, anti-CD3 antibodies, anti-CD4 antibodies, anti-CD28 antibodies, anti-CD52 antibodies, mTOR inhibitors, calcineurin inhibitors, and antiviral drugs.

94. The method of claim 93, wherein the anti-CD154 antibody is administered prior to, subsequently to, or simultaneously with the one or more supplemental agents.

95. The method of claim 93 or 94, wherein the immunosuppressive drug or immunomodulatory drug is selected from the group consisting of cyclosporine A, tacrolimus (FK-506), doxorubicin, azathioprine, busulfan, cyclophosphamide, fludarabine, 5-fluorouracil, methotrexate, mycophenolate mofetil, mizoribine, leflunomide, a nonsteroidal anti-inflammatory, adrenocortical steroids, rapamycin, deoxyspergualin, FTY720, muromonab-CD3, alemtuzumab, basiliximab, daclizumab, eculizumab, rituximab, bortezomib, siplizumab, anti-thymocyte globulin, leronlimab, siltuximbab, sarilumab, tocilizumab, bevacizumab, ranibizumab, aflibercept and inhibitors of Bruton's tyrosine kinase (BTK), including zanubrutinib, acalabrutinib and ibrutinib and aflibercept.

96. The method of claim 93 or 94, wherein the mTOR inhibitor is selected from the group consisting of rapamycin, everolimus, temsirolimus, ridaforolimus, and deforolimus.

97. The method of claim 93 or 94, wherein the calcineurin inhibitor is selected from the group consisting of cyclosporine, tacrolimus (FK506), and pimecrolimus.

98. The method of claim 93 or 94, wherein the antiviral drug is selected from the group consisting of ribavirin, interferon (alfacon-1), chloroquine, hydroxychloroquine, EIDD-2801, EIDD-1931. GS-5734, ivermectin, favipiravir, indomethacin, chlorpromazine, penciclovir, nafamostat, nitazoxanide, GS-44-524 and remdesivir.

99. A method of inducing hematopoietic chimerism in a transplant recipient, the method consisting of administering to the recipient one or more doses of an anti-CD154 antibody, and transplanting into the recipient hematopoietic stem cells, thereby inducing hematopoietic chimerism in the recipient,
wherein the anti-CD154 antibody is an anti-CD154 antibody according to any one of claims 1-38.

100. The method of claim 99, wherein the anti-CD154 antibody is administered prior to, subsequently to or simultaneously with the transplantation of the hematopoietic stem cells.

101. The method of claim 99 or 100, wherein the anti-CD154 antibody is administered at a dose of 5-50 mg/kg.

102. The method of any one of claims 99-101, wherein the anti-CD154 antibody is administered subcutaneously, intravenously, intravitreally, orally, via inhalation, transdermally, or rectally.

103. The method of any one of claims 99-102, wherein the method further comprises a step of conditioning the transplant recipient prior to the transplantation with stem cells.

104. The method of claim 103, wherein the anti-CD154 antibody is administered prior to, subsequent to, or simultaneously with the conditioning step.

105. The method of claim 103 or 104, wherein the conditioning step is selected from a group consisting of total body irradiation, administration of one or more BCL-2 inhibitors, administration of busulfan, administration of fludarabine phosphate, administration of cyclophosphamide, administration of immunosuppressive one or more T cell-depleting antibodies, administration of cyclosporine A (CsA), administration of tacrolimus (FK-506), administration of one or more interleukin-2 (IL-2) receptor inhibitors, administration of IL-15 receptor inhibitors, administration of rapamycin, administration of one or more anti-αβ T cell receptor antibodies, and administration of one or more CD122 antagonists, administration of kidney donor-derived CD34+ hematopoietic stem cells and CD3+ T-cells (MDR-101 cellular therapy) or a combination thereof.

106. The method of claim 105, wherein the one or more T cell-depleting antibodies are selected from the group consisting of anti-CD4, anti-CD8, anti-CD45, anti-CTLA4, anti-CD20, and anti-CD33 antibodies or a combination thereof.

107. The method of claim any one of claims 99-106, wherein the transplant recipient has cancer.

108. The method of claim any one of claims 99-107, wherein the transplant is a bone marrow transplant.

109. A method of inducing central tolerance in a transplant recipient, the method comprising administering to the recipient one or more doses of an anti-CD154 antibody, transplanting into the recipient hematopoietic stem cells, and transplanting a donor tissue into the recipient, wherein the hematopoietic stem cells produce immune cells that are tolerant of the donor tissue, thereby inducing central tolerance in the recipient, and
wherein the anti-CD154 antibody is an anti-CD154 antibody according to any one of claims 1-38.

110. The method of claim 109, wherein the anti-CD154 antibody is administered prior to, subsequently to or simultaneously with the transplantation of the hematopoietic stem cells.

111. The method of claim 109 or 110, wherein the anti-CD154 antibody is administered at a dose of 5-50 mg/kg.

112. The method of any one of claims 109-111, wherein the anti-CD154 antibody is administered subcutaneously, intravenously, intravitreally, orally, via inhalation, transdermally, or rectally.

113. The method of any one of claims 109-112, wherein the method further comprises one or more treatments to condition the recipient for hematopoietic stem cell transplantation.

114. The method of claim 113, wherein the one or more treatments to condition the recipient for hematopoietic stem cell transplantation is selected from a group consisting of total body irradiation, administration of abatacept, administration of one or more BCL-2 inhibitors, administration of busulfan, administration of fludarabine phosphate, administration of cyclophosphamide, administration of one or more immunosuppressive T cell-depleting antibodies, administration of cyclosporine A (CsA), administration of FK-506, administration of one or more interleukin-2 (IL-2) inhibitors, administration of rapamycin, administration of one or more anti-αβ T cell receptor antibodies, and administration of one or more CD122 antagonists or a combination thereof.

115. The method of claim 114, wherein the one or more T cell-depleting antibodies are selected from the group consisting of anti-CD4, anti-CD8, anti-CD45, anti-CTLA4, anti-CD20, and anti-CD33 antibodies or a combination thereof.

116. A method of inhibiting xenotransplant rejection in a subject, comprising administering to the subject an effective amount of an anti-CD154 antibody, wherein the anti-CD154 antibody is an anti-CD154 antibody according to any one of claims 1-38.

117. The method of claim 116, wherein the anti-CD154 antibody is administered at a dose of 5-50 mg/kg.

118. The method of claim 116 or 117, wherein the xenotransplant is from a non-human donor selected from a group consisting of a pig, a mini-swine, and a non-human primate.

119. The method of claim 118, wherein the non-human donor is a pig or mini-swine that has been engineered to decrease or eliminate expression of one or more genes selected from the group consisting of porcine endogenous retroviruses (PERV), α-1,3-galactosyltransferase (GGTA1), cytidine monophosphate-N-acetylneuraminic acid hydroxylase (CMAH), β1,4-N-acetylgalactosaminyltransferase (β4GalNT2), and MHC class I.

120. The method of claim 119, wherein the PERV is a PERV A, a PERV B, or a PERV C.

121. The method of claim 119 or 120, wherein the expression of all PERV genes has been eliminated in the pig or mini-swine.

122. The method of any one of claims 119-121, wherein the expression of the one or more genes is decreased or eliminated using CRISPR/Cas9 gene editing.

123. The method of any one of claims 118-122, wherein the non-human donor has been engineered to express one or more human proteins selected from the group consisting of a complement regulatory protein, human α-galactosidase, a coagulation regulatory protein, a human anti-inflammatory protein, and human CTLA-4-Ig or a combination thereof.

124. The method of claim 123, wherein the one or more human proteins are expressed in all tissues of the non-human donor.

125. The method of claim 123, wherein the one or more human proteins are expressed in a tissue-specific manner in the non-human donor.

126. The method of any one of claims 123-125, wherein the complement regulatory protein is selected from the group consisting of human decay-accelerating factor (CD55), membrane cofactor protein (CD46) and CD59.

127. The method of any one of claims 123-125, wherein the coagulation regulatory proteins are selected from the group consisting of thrombomodulin, endothelial protein C receptor, tissue factor pathway inhibitor, CD39, and CD73.

128. The method of any one of claims 123-125, wherein the human anti-inflammatory proteins are selected from the group consisting of hemeoxygenase-1 (HO-1) and A20.

129. The method of any one of claims 116-128, wherein the xenotransplant rejection is associated with a solid organ transplant selected from the group consisting of a heart transplant, a kidney transplant, a liver transplant, a lung transplant, a pancreas transplant, a kidney-pancreas transplant, a heart-lung transplant, kidney-heart transplant, a kidney-heart-pancreas transplant, a heart-liver transplant, a heart-liver-kidney transplant, a heart-lung-kidney transplant, a heart-lung-liver transplant, a lung-kidney transplant, a lung-liver transplant, a liver-intestines-pancreas transplant, an intestines-pancreas transplant, a liver-kidney-intestines-pancreas transplant, and a kidney-intestines transplant.

130. The method of claim 49, wherein the immune response is complement-mediated.

131. The method of any one of claims 49-98, wherein the anti-CD154 antibody is administered in combination with one or more fusion peptides that bind to and block the function of CD28, optionally selected from the group consisting of abatacept and belatocept.
